United States Patent Application Publication US 2025/0236838 A1 - sequence listing, part 4

SEQ ID NO: 2 - DNA, 5413150 bp, Escherichia coli (residues 1-1,804,384 of 5,413,150)
  source 1..5413150: mol_type = genomic DNA
agcttttcattctgactgcaacgggcaatatgtctctgtgtggattaaaaaaagagtgtctgatagcagcttctgaactggttacctgccgtgagtaaattaaaattttattgacttaggtcactaaatactttaaccaatataggcatagcgcacagacagataaaaattacagagtacacaacatccatgaaacgcattagcaccaccattaccaccaccatcaccattaccacaggtaacggtgcgggctgacgcgtacaggaaacacagaaaaaagcccgcacctgacagtgcgggcttttttttcgaccaaaggtaacgaggtaacaaccatgcgagtgttgaagttcggcggtacatcagtggcaaatgcagaacgttttctgcgggttgccgatattctggaaagcaatgccaggcaggggcaggtggccaccgtcctctctgcccccgccaaaatcaccaaccatctggtagcgatgattgaaaaaaccattagcggccaggatgctttacccaatatcagcgatgccgaacgtatttttgccgaacttctgacgggactcgccgccgcccagccgggatttccgctggcacaattgaaaactttcgtcgaccaggaatttgcccaaataaaacatgtcctgcatggcatcagtttgttggggcagtgcccggatagcatcaacgctgcgctgatttgccgtggcgagaaaatgtcgatcgccattatggccggcgtgttagaagcgcgtggtcacaacgttaccgttatcgatccggtcgaaaaactgctggcagtgggtcattacctcgaatctaccgttgatattgctgaatccacccgccgtattgcggcaagccgcattccggctgaccacatggtgctgatggctggtttcactgccggtaatgaaaaaggcgagctggtggttctgggacgcaacggttccgactactccgctgcggtgctggcggcctgtttacgcgccgattgttgcgagatctggacggatgttgacggtgtttatacctgcgatccgcgtcaggtgcccgatgcgaggttgttgaagtcgatgtcctatcaggaagcgatggagctttcttacttcggcgctaaagttcttcacccccgcaccatcacccccatcgcccagtttcagatcccttgcctgattaaaaataccggaaatcctcaagcaccaggtacgctcattggtgccagccgtgatgaagacgaattaccggtcaagggcatttccaatctgaataacatggcaatgttcagcgtttccggcccggggatgaaagggatggttggcatggcggcgcgcgtctttgcagcgatgtcacgcgcccgtatttccgtggtgctgattacgcaatcatcttccgaatacagtatcagtttctgcgttccgcaaagcgactgtgtgcgagctgaacgggcaatgcaggaagagttctacctggaactgaaagaaggtttactggagccgttggcggtgacggaacggctggccattatctcggtggtaggtgatggtatgcgcaccttacgtgggatctcggcgaaattctttgccgcgctggcccgcgccaatatcaacattgtcgccattgctcagggatcttctgaacgctcaatctctgtcgtggtcaataacgatgatgcgaccactggcgtgcgcgttactcatcagatgctgttcaataccgatcaggttatcgaagtgtttgtgattggcgtcggtggcgttggcggtgcgctgctggagcaactgaagcgtcagcaaagctggttgaagaataaacatatcgacttacgtgtctgcggtgttgctaactcgaaggcactcctcaccaatgtacatggccttaatctggaaaactggcaggaagaactggcgcaagccaaagagccgtttaatctcgggcgcttaattcgcctcgtgaaagaatatcatctgctgaacccggtcattgttgactgtacttccagccaggcagtggcggatcaatatgccgacttcctgcgcgaaggtttccacgttgttacgccgaacaaaaaggccaacacctcgtcgatggattactaccatcagttgcgttatgcggcggaaaaatcgcggcgtaaattcctctatgacaccaacgttggggctggattaccggttatcgagaacctgcaaaatctgctcaatgctggtgatgaattgatgaagttctccggcattctttcaggttcgctttcttatatcttcggcaagttagacgaaggcatgagtttctccgaggcgaccacactggcgcgggaaatgggttataccgaaccggacccgcgagatgatctttctggtatggatgtggcgcgtaagctattgattctcgctcgtgaaacgggacgtgaactggagctggcggatattgaaattgaacctgtgctgcccgcagagtttaacgccgagggtgatgtcgccgcttttatggcgaatctgtcacagctcgacaatctctttgccgcgcgtgtggcgaaggcccgtgatgaaggaaaagttttgcgctatgttggcaatattgatgaagatggcgtctgccgcgtgaagattgccgaagtggatagtaatgatccgctgttcaaagtgaaaaatggcgaaaacgccctggccttctatagccactattatcagccgctgccgttggtactgcgcggatatggtgcgggcaatgacgttacagctgccggtgtctttgctgatctgctacgtaccctctcatggaagttaggagtctgacatggttaaagtttatgccccggcttccagtgccaatatgagcgtcgggtttgatgtgctcggggcggcggtgacacctgttgatggtgcattgctcggagatgtagtcacggttgaggcggcagagacattcagtctcaacaacctcggacgctttgccgataagctgccgtcagaacctcgggaaaatatcgtttatcagtgctgggagcgtttttgccaggagctgggtaagcaaattccagtggcgatgactctggaaaagaatatgccaatcggctcgggcttaggctccagtgcctgttcggtggtcgcggcgctgatggcgatgaatgaacactgtggcaagccgcttaatgacactcgtttgctggctttgatgggcgagctggaaggacgaatctccggcagcattcattacgacaacgtggcaccgtgttttcttggtggtatgcagttgatgatcgaagaaaacgacatcatcagccagcaagtgcctgggtttgatgagtggctgtgggtgctggcgtatccggggattaaagtctcgacggcagaagccagggctattttaccggcgcagtatcgccgccaggattgcattgcgcacgggcgacatttggcaggcttcattcacgcctgctattcccgtcagcctgagcttgccgcgaatctgatgaaagatgttatcgctgaaccctaccgtgaacggttactgcctggtttccggcaggcgcggcaggcggtcgcggaaatcggcgcggtagcgagcggtatctccggctccggcccgactttgttcgctctgtgtgacaagccggataccgcccagcgcgttgccgactggttgggtaagaactacctgcaaaatcaggaaggttttgttcatatttgccggctggatacggcgggcgcacgagtactggaaaactaaatgaaactctacaatttgaaagatcacaatgagcaggtcagctttgcgcaagccgtaacccaggggttgggcaaaaatcaggggctgtttttcccgcacgacctgccggaattcagcctgactgaaattgatgagatgctgaagctggattttgtcacccgcagtgcgaagatcctctcggcgtttattggtgatgaaatcccgcaggaaatcctggaagagcgcgtacgcgcggcgtttgccttcccggctccggtcgccaatgttgaaagcgatgtcggttgtctggaattgttccacgggccaacgctggcatttaaagatttcggcggtcgctttatggcacaaatactgacccatattgcgggcgataagccagtgaccattctgaccgcgacatccggtgatactggagcggcagtggctcatgctttctacggtttaccgaatgtgaaagtggttatcctctatccacgaggcaaaatcagtccactgcaagaaaaactgttctgtacattgggcggcaatatcgaaactgttgccatcgacggcgatttcgatgcctgtcaggcgctggtgaagcaggcgtttgatgatgaagaactgaaagtggcgctggggctaaactctgctaactccattaacatcagccgtttgctggcgcagatttgctactactttgaagctgttgcgcagctgccgcaggaagcgcgcaaccagctggttgtctcggtgccaagcggaaacttcggcgatttgacggcgggtctgctggcgaagtcactcggtctgccggtgaaacgttttattgctgcgaccaacgtgaacgataccgtgccacgtttcctgcacgacggtcagtggtcacccaaagcgactcaggcgacgttatccaatgcgatggatgttagccagccaaacaactggccgcgtgtggaagagttgttccgccgcaaaatctggcaactgaaagagctggggtatgcagccgtggatgatgaaaccacgcaacagacaatgcgtgagttaaaagaactgggctatacctcggagccgcacgctgccgtagcttatcgtgcgctgcgtgaccagttgaatccaggcgaatatggcttgttcctcagcaccgcgcatccggcgaaatttaaagagagcgtggaagcgattctcggtgaaacgttggatctgccaaaagagctggcagaacgtgctgatttacccttgctttcgcataacctgcccgccgattttgctgcgttgcgtaaattgatgatgaatcatcagtaacatctattcattatctcaatcaggccgggtttgcttttatgcagcccggcttttttatgaagaaaatatggagaaaaatgacagggaaaaaggagaaattctcaataaatgcggtaatttagagattaggattgcggagaataacaactgccgttctcatcgcgtaatctccggatatcgacccataacgggcaatgataaaaggagtaacctgtgaaaaagatgcaatctatcgtactcgcactttccctggttctggtcgctcccatggcagcgcaggctgcggaaattacgctagtcccgtcagtaaaattacagataggcgatcgtgataatcgtggctattactgggatggcggtcactggcgcgaccacggctggtggaaacaacattatgaatggcgaggcaatcgctggcacccatatggaccgccgccatcgccgcgccataacaagcacaatgatcatcgtggcgatcatcgtccggggcctgacaaacatcatcgctaaatatcaatgccggattgccatccggcattatccggcattatccggcattgactacaaacttaacgttgttcgtagcgtttaaacaccagttcgccattgctggaggaagcttcatcaaagaagtaaccttcgctattaaaaccagtcagttgctctggtttggtcagccgattttcaataatgaaacgactcatcagaccgcgtgctttcttagcgtagaagctgattatcttaaatttgccgttcttctcatcgaggaacactggtttgataatctcggcattcaatttcttcggcttcaccgatttaaaatactcatctgacgccagatttatcactacattatcgccttgtgctgcgagcgcctcgttcagcttgttggtgatgatatctccccagaattgatacagatctttccctcgggcattctcaagacgtatccccatttccagacgataaggctgcattaaatcgagcgggcgcagtacgccatacaagccggaaagcattcgcaaatgctgttgggcaaaatcgaaatcgtcttcgctgaaggtttcggcctgcaagccagtgtagacatcacctttaaacgccagaattgcctggcgggcattctccggtgtgaaatctggctgccagtcatgaaagcgagcggcgttgatacccgccagtttgtcgctgatgcgcatcagggagctaatctgcgggggcgtcagtttccgcgcttcatggatcagctgctgggagttgtctaacagctccggcagcgtatagcgcgtggtggtcaacgggctttggtaatcaagcgttttcgcaggtgaaataagaatcagcatatccagtccttgcaggaaatttatgccgactttagcaaaaaaagagaatgagttgatcgatagttgtgattactcctgcgaaacatcatcccacgcgtctggagaaagctggcgaccgatctccggataacgcaacggatcaaacaccgggcgcacgccgagtttacgctggcgtagataatcactggcaatggtatgaaccacaggcgagagcagtaatatggcggtcaaattggtaatagccatgcaggccataatgatatctgccagttgccacatcagcggaaaacttagcaaggtgccgccgatgaccgttgcgaaggtgcagatccgcagacaccagatcgctttagggttgttcaggcgtaaaaagaagaaattgttttcggcataaatgtagttggcaacgatggagctgaaggcaaacagaataaccacgagggtaacaaactccgcaccccaggaacccattagcacccgcatcgccttctggataagctgaataccttccagcggcatgtaggttgtgccgttacccgccagtaatatcagcatggcgcttgccgtgcagatgaccagggtgtcgataaaaatgccaatcatctggacaattccttgcgctgccggatgcggaggccaggacgcagctgccgctgccgcgtttggcgtcgaccccattcccgcctcattggaaaacatactgcgctgaaaaccgttagtaatcgcctggcttaaggtatatcccgccgcgccgcctgcagcttcctgccagccaaaagcactctcaaaaatagaccaaatgacgtggggaagttgcccgatattcattacgcaaatcaccaggcaggtcagtacccagattatcgccatcaacgggacaaacccctgcatgagccgggcgacgccatgaagaccgcgagtgatcgccagcatagcaaagacagcgagaataatacctgtcaccagcgggggaaaatcaaaagaaaaactcagggctcgcgcaacggcgttcgcctgaactccgctgaaaattatggcgtaggcgatgagcaaaaagacggcgaacagaacgcccatccagcgcatccccagcccgcgcgccatataccatgccggtccgccacgaaactgcccattggcatcacgttctttataaagctgtgcgagggaacattcggcaaacgaggtcgccatgccgataaatgcggcaacccacatccagaagacggctccaggtccaccggcggtaattgccagcgcaacgccggccaggttgccgctacccacgcgcgctgcaagactggtacacaatgactgaaatgaggttaaaccgcctggctgtggatgaatgctatttttaagacttttgccaaactggcggatgtagcgaaactgcacaaatccggtgcgaaaagtgaaccaacaacctgcgccgaagagcaggtaaatcattaccgatccccaaaggacgctgttaataaaggagaaaaaatctggcatgcatatccctcttattgccggtcgcgatgactttcctgtgtaaacgttaccaattgtttaagaagtatatacgctacgaggtacttgataacttctgcgtagcatacatgaggttttgtataaaaatggcgggcgatatcaacgcagtgtcagaaatccgaaacagtctcgcctggcgataaccgtcttgtcggcggttgcgctgacgttgcgtcgtgatatcatcagggcagaccggttacatccccctaacaagctgtttaaagagaaatactatcatgacggacaaattgacctcccttcgtcagtacaccaccgtagtggccgacactggggacatcgcggcaatgaagctgtatcaaccgcaggatgccacaaccaacccttctctcattcttaacgcagcgcagattccggaataccgtaagttgattgatgatgctgtcgcctgggcgaaacagcagagcaacgatcgcgcgcagcagatcgtggacgcgaccgacaaactggccgtaaatattggtctggaaatcctgaaactggttccgggccgtatctcaactgaagttgatgcgcgtctttcctatgacaccgaagcgtcaattgcgaaagcaaaacgcctgatcaaactctacaacgatgcaggtattagcaacgatcgtattctgatcaaactggcttctacctggcagggtatccgtgctgcggaacagctggaaaaagaaggcatcaactgtaacctgaccctgctgttctccttcgctcaggctcgtgcttgtgcggaagcgggcgtgttcctgatctcgccgtttgttggccgtattcttgactggtacaaagcgaataccgataagaaagagtacgctccggcagaagatccgggcgtggtttctgtatctgaaatctaccagtactacaaagagcatggttatgaaaccgtggttatgggcgcaagcttccgtaacatcggcgaaattctggaactggcaggctgcgaccgtctgaccatcgcaccggcactgctgaaagagctggcggagagcgaaggggctatcgaacgtaaactgtcttacactggtgaagtgaaagcgcgtccggcgcgtatcactgagtccgagttcctgtggcagcacaaccaggatccaatggcagtagataaactggcggaaggtatccgtaagtttgctgttgaccaggaaaaactggaaaaaatgatcggcgatctgctgtaatcatacttagcgtgaccgggaagtcggtcacgctacctcttctgaaacctgtctgtcactcccttcgcagtgtatcattctgtttaacgagactgtttaaacggaaaaatcttgatgaatactttacgtattggcttagtttccatctctgatcgcgcatccagcggcgtttatcaggataaaggcatccctgcgctggaagaatggctgacatcggcgctaaccacgccgtttgaactggaaacccgcttaatccccgatgagcaggcgatcatcgagcaaacgttgtgtgagctggtggatgaaatgagttgccatctggtgctcaccacgggcggaactggcccggcgcgtcgtgacgtaacgcccgatgcgacgctggcagtagcggaccgcgagatgccaggctttggtgaacagatgcgccagatcagcctgcattttgtaccaactgcgatcctttcgcgtcaggtgggggtgattcgcaaacaggcgctgatccttaacttacccggtcaaccgaagtctattaaagagacgctggaaggtgtgaaggacgctgagggtaacgttgtggtgcacggtatttttgccagcgtaccgtactgcattcagttgctggaagggccatacgttgaaacggcaccggaagtggttgcagcattcagaccgaagagtgcaagacgcgaagttagcgaataaaaaaatccccccaagcggggggatcagactgatgacaaacgcaaaactgcctgatgcgctacgcttatcaggcctacgatcttcttgcaatatattgaatttgcacgattttgtaggccggataaggcgttcacgccgcatccggcataaacaaagcgcacgttgttaacaatcttatcccttcgagcggggggagcttaataattagtgagactcaccaatcggcagaacggtgcgaccaaactgctcgttcagcacttcacccatcgccagatagattgcactggcaccgcagataagaccaatccagccggcaaagtggatgatcgcggcgttaccggcaatgttaccgatcgccagcagggcaaacagcacggtcaggctaaagaaaacgaattgcagaacgcgtgcgcctttcagcgtgccgaagaacataaacagcgtaaatatgccccacagacccaggtagacaccaaggaactgtgcatttggcgcatcggtcagccccagtttcggcatcagcagaattgcaaccagcgtcagccagaaagaaccgtaagaggtgaatgcggttaaaccgaaagtgttgccttttttgtactccagcagaccggcaaaaatttgcgcgatgccgccgtagaaaatgcccatggcaagaataataccgtccagagcaaaataacccacgttgtgcaggttaagcagaatggtggtcatgccgaagcccatcaggcccagcggtgccggattagccaacttagtgttgcccataattcctcaaaaatcatcatcgaatgaatggtgaaataatttccctgaataactgtagtgttttcagggcgcggcataataatcagccagtggggcagtgtctacgatcttttgaggggaaaatgaaaattttccccggtttccggtatcagacctgagtggcgctaaccatccggcgcaggcaggcgatttgcagtacggctggaattgtcacgcgataggcactgccgctgaccgctttaaccccatttaatgctgcgcccacagggcctcccagacccgcgccgcgcagcaaaccatgcccaagcacgctcattgctgcgtgggtgcgtaaaatgcgggtcaattggctggaaagcaaatgcgacacaccttttgccaataatttgtctttcatcagcagcggcagcagctcttccagctcattcaccctggcatcgaccgcgtgcagaaactcctgcttatgttcctcgtccattttcttccaggtattacgcagaaattgttccagtaactgttgctcaatttcaaacgtagacatctctttgtcggctttcagcttcaatcgctttgaaacatcgagcaaaatggcgcgatacaatttaccgtgtccgcgcagtttgttggcgatactatcgccaccaaaatgctgaaattctccggcaatcagctgccagttgcggcggtgtcgctcgggatgtccttccatcgatttaaacagttcgttgcgcatcagtacgctggagaggcgagttttgcctttttcattatgggtgagcagccgggcgaaatttgccaactgttcctcactacaatgctggagaaaatccagatctgaatcattcaggtaattaacattcattttttgtggtttctatattctggcgttagtcgtcgccgataattttcagcgtggccatatccgatgagttcactgtatgaccggaaaaggtgatttttgagacgcagcgtttgttgtcgttatcgctgttaatgttgatccagtcagtggtttgctcttcttttatttctgaaggaatattcagggtctgactggcgcttcgggtggctttgaaataaatcgatgcaccgcttaactgcaaatcgccatggtcggctgagagttgtatgcgtttaacaatgcgacaaacaggaagtttcagcgccagatcgttggtttcgtttcgcggcattgcaatgacgccgaggattttatggtcgtttgcctgcgccgtgcagcacagcatcaggctaatcgccaggctggcggaaatcgtaataacggatttcataaggattctcttggtggggaggggtaaggggatgaaactagtttactgctgataaagagaagtttcaggtacgtaatattttctttttattacaattttttgatgaatgccttggctgcgattcattctttatatgaataaaattgttgtcagtttcacgtcttgtcctgccatatcgcgaaatttctgcgcaaaagcacaaaaaatttttgcatctcccccttgatgacgtgggttacgaccccatttagtagtcaaccgcagtgagtgagtctgcaaaaaaatgaaattgggcagttgaaaccagacgtttcgcccctattacagactcacaaccacatgatgaccgaatatatagtggagacgtttagatgggtaaaataattggtatcgacctgggtactaccaactcttgtgtagcgattatggatggcaccactcctcgtgtactggagaacgccgaaggcgatcgcaccacgccttctatcattgcctatacccaggatggtgaaactctggttggtcagccggctaaacgtcaggcagtgacgaacccgcaaaacaccctgtttgcgattaaacgcctgattggccgccgcttccaggacgaagaagtacagcgtgatgtttccatcatgccgttcaaaattattgctgctgataacggcgacgcatgggtcgaagttaaaggccagaaaatggcaccgccgcagatctctgcagaagtgctgaaaaaaatgaagaaaaccgctgaagattacctgggtgaaccggtaactgaagctgttattaccgtaccggcatactttaacgatgctcagcgtcaggcaaccaaagacgcaggccgtatcgctggtctggaagtaaaacgtatcatcaacgaaccgaccgcagctgcgctggcttacggtctggacaaaggtactggcaaccgtactatcgcggtttatgacctgggtggtggtactttcgatatttccattatcgaaatcgacgaagttgacggcgaaaaaaccttcgaagttctggcaaccaacggtgatacccacctgggtggtgaagacttcgacagtcgtctgatcaactatctggttgaagaattcaagaaagatcagggcattgacctgcgcaacgatccgctggcaatgcagcgcctgaaagaagcggcagaaaaagcgaaaatcgaactgtcttccgctcagcagaccgacgttaacctgccgtacatcactgcagacgcgaccggtccgaaacacatgaacatcaaagtgactcgtgcgaaactggaaagcctggttgaagatctggtaaaccgttccattgagccgctgaaagttgcactgcaggacgctggcctgtccgtatctgatatcgacgacgttatcctcgttggtggtcagactcgtatgccaatggttcagaagaaagttgctgaattctttggtaaagagccgcgtaaagatgttaacccggacgaagctgtagccatcggtgctgctgttcagggtggtgttctgactggtgacgtaaaagacgtactgctgctggacgttaccccgctgtctctgggtatcgaaaccatgggcggtgtgatgaccacgctgatcgcgaaaaacaccactatcccgaccaagcacagccaggtgttctctaccgctgaagacaaccagtctgcggtaaccatccatgtgctgcagggtgaacgtaaacgtgcggctgataacaaatctctgggtcagttcaacctggatggtatcaacccggcaccgcgcggcatgccgcagatcgaagttaccttcgatatcgatgctgacggtatcctgcacgtttccgcgaaagacaaaaacagcggtaaagagcagaagatcactatcaaggcttcttctggtctgaacgaagatgaaatccagaaaatggtacgcgacgcagaagctaacgccgaagctgaccgtaagtttgaagagctggtacagactcgcaaccagggcgaccatctgctgcacagcacccgtaagcaggttgaagaagcaggcgacaaactgccggctgacgacaaaactgctatcgagtctgcgctgactgcactggaaactgctctgaaaggtgaagacaaagccgctatcgaagcgaaaatgcaggaactggcacaggtttcccagaaactgatggaaatcgcccagcagcaacatgcccagcagcagactgccggtgctgatgcttctgcaaacaacgcgaaagatgacgatgttgtcgacgctgaatttgaagaagtcaaagacaaaaaataatcgccctataaacgggtaattatactgacacgggcgaaggggaatttcctctccgcccgtgcattcatctaggggcaaatcaaaaaagatggctaagcaagattattacgagattttaggcgtttccaaaacagcggaagagcgtgaaatcaaaaaggcctacaaacgcctggccatgaaataccacccggaccgtaaccagggtgacaaagaggccgaggcgaaatttaaagagatcaaggaagcttatgaagttctgaccgactcgcaaaaacgtgcggcatacgatcagtatggtcatgctgcgtttgagcaaggcggcatgggcggcggcggttttggcggcggcgcagacttcagcgatatttttggtgacgttttcggcgatatttttggcggcggacgtggtcgtcaacgtgcggcgcgcggtgctgatttacgctataacatggagctcaccctcgaagaagctgtacgtggcgtgaccaaagagatccgcattccgactctggaagagtgtgacgtttgccacggtagcggtgcaaaaccaggtacacagccgcagacctgtccgacctgtcatggttctggccaggtgcagatgcgccagggtttctttgccgtgcagcagacctgtccacactgtcagggccgcggtacgctgatcaaagatccgtgcaacaaatgtcatggtcatggtcgtgttgagcgcagcaaaacgctgtccgttaaaatcccggcaggggtggacactggagaccgcatccgtcttgcgggcgaaggtgaagcgggtgaacacggcgcaccggcaggcgatctgtacgttcaggttcaggttaaacagcacccgattttcgagcgtgaaggcaacaacctgtattgcgaagtcccgatcaacttcgctatggcggcgctgggtggtgaaatcgaagtaccgacccttgatggtcgcgtcaaactgaaagtgcctggcgaaacccagaccggtaagctgttccgtatgcgcggtaaaggcgtcaagtatgtccgcggtggcgcacagggtgatttgctatgccgcgttgttgtcgaaacaccggtaggtttgaacgagaagcagaaacagctgctgcaagagctgcaagaaagctttggtggcccaaccggcgagcacaacagcccgcgttcaaagagcttctttgatggcgtgaagaagttttttgacgacctgactcgctaacctccccaaaagcctgcccgtgggcaggccagggtaaaaaccagggtgcgttgaagatatgcgagcacctgtaaagtggcggggatcactccccgccgttgctcttactcggattcgtaagccgtgaaaacagcaacctccgtctggccagttcggatgtgaacctcacagaggtcttttctcgttaccagcgccgccactacggcggtgatacagatgacgatcagggcgacaatcatcgccttatgctgcttcattgctctcttctccttgacctttcggtcagtaagaggcactctacatgtgttctgcatatagggggcctcgggttgatggtaaaatatcactcggggcttttctctatctgccgttcagccaatgcctgagacagacagcctcaagcacccgccgctattatactgcgcttttaattcacttctgttttatcaattctttttctgaagacgcctcgcatttttgcggaataatatttcaatacatcaatttatttaacttaaatatatccagggattcacaaaaaaaggtgttttcctctatcaaaagtgaatggctaaaggaaattaattattaaaggttactgtaatactatagagagacaaagaaatacgttcagcagctaatgctaagttcatcatgaaaaatgcctataaatcaaagggtgatgtttaaaacagacacattttctgaaacacgatatccctccgcccgttcgcaaaagtaatctgcgatcttcatcacgcttcgatagtcatctttaaatatactggcctggtcattcttaataaaaatgaattgtctggtgtattaattcctatggaatcataaaaacaatgaatggagaacatattatatgtctgccaaaagacgacttcttattgcgtgtaccttgataacagctatctatcattttcctgcatattcttcattagaatataaaggaacctttggttcaataaatgcgggttatgcagactggaacagtggatttgtaaacactcaccgtggtgaagtatggaaagtgactgcggattttggggtaaattttaaagaagcagaattttactcattttatgaaagtaatgtactcaatcatgctgtagcagggagaaatcatacggtttcagcaatgacgcatgtcagactctttgactctgatatgacattctttggcaaaatttatggccaatgggataactcatggggtgacgatctggacatgttttatggattcggttacctcggctggaacggcgagtggggcttttttaaaccgtatattggattgcataatcaatctggtgactacgtatcagctaaatatggtcaaacgaatggttggaatggttatgttgttggctggacagcagtattaccatttacgttatttgacgaaaaatttgttttatctaactggaatgaaatagaactggacaggaacgatgcttacacggagcagcaatttggccggaacgggttaaatggcggtttaactattgcctggaagttctatcctcgctggaaagcaagtgtgacgtggcgttatttcgataataagctgggctacgatggctttggcgatcaaatgatttatatgcttggttatgatttctaatttttatcagggaataattatgcagaaaacgttaatggccagtttgatcggccttgcagtttgcacagggaatgcttttagtcctgccttagccgcagaggctaaacaacctaatttagtcattattatggcggatgatttaggttatggcgatttagcaacatatggtcatcagatcgttaaaacacctaatatcgacaggcttgcccaggaaggggtcaaatttactgactactatgcccccgctcctttaagttcaccttcacgcgcagggctattaaccggccggatgccatttcgtactggaattcgctcatggattccttcaggcaaagatgttgccttagggcgtaacgaactcacgattgctaatctactcaaagcgcaagggtacgacacggcaatgatgggtaagctgcatctgaatgcaggcggcgatcgcaccgatcagccacaagcacaagatatgggctttgattactcactggctaatacggcgggctttgttaccgacgccacgctggataacgctaaagaacgcccgcgttatggcatggtttacccgacaggctggctacgtaatgggcaacccactccacgagccgataaaatgagcggtgagtatgtcagttcggaagtcgtcaactggctggataacaaaaaggacagcaagcctttcttcctctatgttgcttttaccgaagtgcatagccccctggcttcgcccaaaaaatacctcgacatgtactcacaatatatgagcgcgtatcagaagcagcatcctgatttattttatggcgactgggcagacaaaccctggcgtggtgtgggggaatattatgccaatatcagctatctggatgcacaggttggaaaagtgctggataaaatcaaagcgatgggtgaagaagataacacaatcgttatttttaccagtgataacggtccggtaacgcgtgaagcgcgcaaagtgtatgagctgaatttggcaggggaaacggatggattacgcggtcgcaaggataacctttgggaaggcggaattcgtgttccagccattattaaatatggtaaacatctaccacagggaatggtttcagatacacccgtttatggtctggactggatgcctactttagcgaaaatgatgaacttcaaattacctacagaccgtactttcgatggtgaatcgctggttcctgttcttgagcaaaaagcattgaaacgcgaaaagccattaattttcgggattgatatgccattccaggatgatccaaccgatgaatgggcgatccgtgatggtgactggaagatgattatcgatcgcaataataaaccgaaatatctctacaatctgaaatctgatcgttatgaaacacttaatctgatcggtaaaaaaccagatattgaaaaacagatgtatggtaagtttttaaaatataaaactgatattgataatgattctctaatgaaagccagaggtgataaaccagaagcggtgacctggggctaacctgataatcataataaatgtaatgtatgccatttagggctatgcccgcctgattcagtgctacgcattgaatcaggttcttttcgcgttgaacaatatcaagatacggctattcgcagggagtggatatgtttaccaacgtaaatgttgattgttgcaaaacaccaggatgtaaaaacttggggttgctgaatagccaggattatgtcgcacagggtaaaaatattttatgccgtgaatgtggttacttgtttccagtgatatctgaacagtcgcttaatatttatcgtaatattgtgaatcactcctggagaggtttgatttgccaatgttcaacttgcggaggcacgtccctcaaaaaatatggatattctgcacaaggccagagaagaatgtattgccatcattgtgagaaaacatttatcactctggaacacgtaattaccacaccacgaggagcccagttagcattgatgattgagcaaggggaggcacttgcggatatcagaaagtcattacttcttaacagcactggacttagccgtgaactgttaaaattagcgcgtgaagcaaactataaagaaagtcgacagtgtttcccagcttctgatattaccctgagtacccgcgcttttcgcgtcaagtataatggtagcaataactctctttatgctcttgttaccgcagaagaacaaagcggcagggtggttgctatctcaaccaattactccccatctgccgtagagcaacattatcaatacacatcgaactatgaagagcgtatgtctccagggacgctggcacatcatgtccagcgcaaagagttacttactatgcggcgggataccttgtttgatattgattacggcccggcagttttacatcaaaacgatccgggaatgttggtaaaaccggttcttccggcatatcgtcattttgaactggtcagaatactgaccgatgagcattccaacaacgttcagcattaccttgatcacgaatgctttatattgggcggctgcctgatggctaatttgcagcatattcatcaaggtcgctgccatatttcctttgtcaaagagcgcggtgtggcacccgccaccattgattttccaccgcgattattccttagtggtggggtacgaaataatgtctggcgtgcattttctaaccgcaattattcaatggctgtatgcaatctcactggcagtaagaaagtccgcgagatgcggcatgcaacattgaacagtgcgacgcgttttatccactttgtggagaaccatcctttccttatatcattgaaccgaatgtctcctgcgaatgtcgtttctacattagatatcctcaaacatctgtggaataaaaaactagagcatggaacaatttaattattacttttccgaataatttcttcagaaatcttgacattagactatgattaatggggtttaaggtcatcagccgccgctttcgggcatcaaaaactcatctctcgctgatggcgcaattcttttaatagatcgtaaaaagcgagctattcctacactataatctgattttaacgatgattcgtgcggggtaaaatcgtgaaaacgatctattcacctgaagagaaataaaaagtgaaacatctgcatcgattctttagcagtgatgcctcgggaggcattattctcattattgccgctgtattagcgatgattatggccaacagcggtgcaaccagtggatggtatcacgactttcttgagacgccggttcagctccgggttgggacacttgagatcaacaagaacatgctgctatggatcaatgacgctctgatggcggtatttttcctgttggttggtctggaagttaaacgcgagctgatgcaaggttcgctggccagtctgcgccaggcggcatttcctgttattgccgcaatcggcgggatgattgtcccggcattgctctatctggcttttaactatgccgatccgattacccgcgaaggctgggcaatcccggcggcgactgacattgcctttgcacttggtgtgttggcgctgttgggaagtcgtgttccgttagcgctgaagatctttttgatggctctggctattatcgacgatcttggggccatcattatcatcgcattgttctacactaatgacttatcgatggcctctcttggcgtcgcggctgtagcaattgcggtactcgtggtattgaatctgtgtggtgtacgccgcacgggcgtttatattctggttggcgtggtgctgtggacagcggtgttgaaatcgggggttcacgcaaccctggctggcgtcattgtcggcttctttattcctttgaaagagaagcatgggcgctctccggctaaacgtctggagcatgttttgcatccatgggtggcgtatctgattttgccgctgtttgcatttgctaatgctggcgtttcactgcaaggtgtcacgctggaaggtttgacctccatcctgccattaggggtcatcgctggtttgctgattggcaagccactgggtattagtctgttctgctggttggcgctgcgtttgaaattggcacatctgccagagggaacgacttaccagcaaattatggcggttggtatcctgtgcggtatcggttttactatgtctatctttattgccagcctggcatttggtagcgtagatccagaactgattaactgggcaaaattaggtatccttgtcggttcaatttcttcggcggtaattggatatagctggttacgcgttcgtttacgtccatcagtttgacaggacgatgtactggggagccataaacggctcccttttcattgttatcagggagagaaatgagcatgtctcatatcaattacaaccacttgtattacttctggcatgtctacaaagaaggttctgtggttggcgcagcggaggcgctttatttaacaccacaaaccattaccgggcagatccgggcgctggaagagcgcctgcaagggaaactatttaagcgtaaaggacgtggtctggaacccagcgaactgggggaactggtctatcgctatgccgataaaatgttcaccttaagccaggaaatgctggatatcgtcaactatcgcaaagagtccaacttattgtttgatgttggtgtggcagatgcactttccaaacgtctggtcagcagtgttctggatgccgcagttgtggaagacgagcagatccatctacgctgtttcgaatcgacgcacgagatgcttttagagcagttgagtcagcataaactggatatgatcatctctgactgtccgatcgattccactcagcaggaagggctgttttccatgaaaattggcgaatgtggtgtcagtttctggtgcactaacccactaccagaaaagccgtttcctgcctgtcttgaagagcgtcgtttacttattccggggcgtcgctcaatgttggggcgtaagctattaaactggtttaactcccagggcttgaacgtcgaaattttgggtgagtttgatgatgctgcgttgatgaaagcctttggggcgacgcataacgctattttcgttgcaccttcgctttacgctaatgatttctataacgatgactcggttgtggagataggccgtgttgagaacgtgatggaagagtaccacgcgatttttgccgaaaggatgattcagcaccctgcagtacagcgtatctgcaatacagactattctgcgctgtttactccagcttcaaaataaacatttgtactttgcaggccgaattttggcctgcagatggatataaaaaaacccgccagagcgggtttttttacaaagctgacaacaacaggcaattaagccagtttgttgatctgtgcagtcaggttagccttatgacgtgcagctttgtttttgtggatcagacctttagcagcctgacggtccacgattggttgcatttcgttaaatgctttctgtgcagcagctttgtcgccagcttcgatagctgcgtatactttcttgatgaaagtacgcatcatagagcgacggcttgcgttgtgcttacgagccttttcagactgaatggcgcgcttcttagctgatttgatattagccaaggtccaactcccaaatgtgttctatatggacaattcaaaggccgaggaatatgcccttttagccttcttttgtcaatggatttgtgcaaataagcgccgttaatgtgccggcactcgttacgtagtgatggcgcaggattctaccagcttgcggggtgtgaatacagcttttccgcgagaaaaattgcagcaggcggtcagtttcttcccatgatttgcgccatggcaatgaaaagccacttctttctgattccggtactcaatcgccggttaaccttaaccgctgtacaaggtatactcggacgattttcactgttttgagccagacatgaagctgatacgcggcatacataatctcagccaggccccgcaagaagggtgtgtgctgactattggtaatttcgacggcgtgcatcgcggtcatcgcgcgctgttacagggcttgcaggaagaagggcgcaagcgcaacttaccggtgatggtgatgctttttgaacctcaaccactggaactgtttgctactgataaagccccggcacggctcacccggctgcgggaaaaactgcgttatcttgcagagtgtggcgttgattacgtgctgtgcgtgcgttttgacaggcgttttgcggcgttaaccgcgcaaaacttcatcagtgatcttctggtgaagcacttgcgggtaaaatttcttgccgtaggtgacgatttccgctttggcgctggtcgtgaaggcgatttcttgttattacagaaagcgggcatggaatacggcttcgatatcaccagcacgcaaactttttgcgaaggtggcgtgcgtatcagcagcaccgccgtgcgtcaggcgcttgcggatgacaatctggctctggcagaaagtttactggggcacccgtttgctatctccgggcgtgtagtccacggtgatgaattagggcgcactataggtttcccgacggcgaatgtaccgctacgccgtcaggtttccccggtgaaaggggtttatgcggtagaagtgttgggccttggcgaaaagccgttacccggcgttgcaaacatcggaacacgcccaacggttgccggtattcgccagcaactggaagtgcatttgttagatgttgcaatggacctttatggtcgccatatacaagtagtgctgcgtaaaaaaatacgcaatgagcagcgatttgcatcgctggacgaactgaaagcgcagattgcgcgtgatgaattaaccgcccgcgaattttttgggctaacaaaaccggcttaagcctgttatgtaatcaaaccgaaatacggaaccgagaatctgatgagtgactataaatcaaccctgaatttgccggaaacagggttcccgatgcgtggcgatctcgccaagcgcgaaccgggaatgctggcgcgttggactgatgatgatctgtacggcatcattcgtgcagctaaaaaaggcaaaaaaaccttcattctgcatgatggccctccttatgcgaatggcagcattcatattggtcactcggttaacaagattctgaaagacattatcattaagtccaaagggctttctggatatgactcgccgtatgtgcctggctgggactgtcatggtctgccaatcgaactgaaagtagagcaagaatacggtaagccgggggagaaattcaccgccgctgagttccgcgccaagtgccgcgaatacgctgcgacccaggttgacggtcagcgcaaagactttatccgtctgggcgtgctgggcgactggtcgcacccgtacctgaccatggacttcaaaactgaagccaacatcatccgcgcgctgggcaaaatcatcggcaacggtcacctgcacaaaggcgcgaagccggtgcactggtgcgttgactgccgttctgcactggcagaagcggaagttgagtattacgacaaaacttctccgtccatcgacgtcgctttccaggcggtcgatcaggatgcgctgaaaacgaaatttggcgtaagcaatgttaacggcccaatttcgctggttatctggaccaccacgccgtggacgctgcctgctaaccgcgcaatctccattgcacctgattttgattatgcgctggtgcaaatcgacggtcaggccgtgatcctcgcgaaagatctggttgaaagcgtaatgcagcgtatcggcgttagcgattacaccattcttggcacggtgaaaggtgccgagctggaactgttgcgctttacccatccgtttatggacttcgatgttccggcaattctcggcgaccacgttacgctggatgccggtaccggtgccgttcataccgcgccaggccacggtccggacgactatgtgatcggtcaaaaatatggtctggaaaccgctaacccggttggcccggacggcacttatctgccgggtacttacccgactctggatggcgttaacgtcttcaaagcgaacgatattgtcattgcgttgttgcaggaaaaaggcgcactgttgcacgttgagaaaatgcaacacagctatccgtgctgctggcgtcataaaacgccgatcatcttccgcgcgacgccgcagtggttcgtcagcatggatcagaaaggtctgcgtgcgcagtcactgaaagagatcaaaggcgtgcagtggatccctgactggggccaggcgcgtatcgagtcgatggttgctaaccgtcctgactggtgtatctctcgtcagcgtacctggggcgtgccgatgtcactgttcgtgcacaaagacacagaagaactgcatccgcgtactctcgaactgatggaagaagtggcaaaacgcgttgaagttgacggcattcaggcgtggtgggatctcgatgcgaaagagatcctcggcgacgaagctgatcagtacgtgaaagtgccggatacgctggatgtatggtttgactccggatctacccactcttccgttgttgacgtgcgtccggaatttgccggtcacgcagcggacatgtatctggaaggttctgaccagcaccgtggctggttcatgtcctctctgatgatctctaccgcgatgaagggcaaagcaccgtatcgtcaggtactgacccacggctttaccgtggatggtcagggccgcaagatgtctaaatccatcggcaacaccgtttcgccgcaggatgtgatgaacaaactgggcgcggatattctgcgtctgtgggtggcatcaactgactacaccggtgaaatggccgtttctgacgagatcctgaaacgtgctgccgacagctatcgtcgtatccgtaacaccgcgcgcttcctgctggcaaacctgaacggttttgatccggcaaaagatatggtgaaaccggaagagatggtggtactggatcgctgggccgtaggttgtgcgaaagcggcacaggaagacatcctcaaggcgtacgaagcatacgatttccacgaagtggtacagcgtctgatgcgcttctgctccgttgagatgggttccttctacctcgacatcatcaaagaccgtcagtataccgccaaagcggacagcgtggcgcgtcgtagctgccagactgcgctgtatcacatcgcagaagcgctggttcgctggatggcaccaatcctctccttcaccgctgatgaagtgtggggttacctgccgggcgaacgtgaaaaatacgtcttcaccggcgagtggtacgaaggcctgtttggtctggcagacagtgaagcaatgaacgatgcgttctgggacgagctgttgaaagtgcgtggcgaagtgaacaaagtcattgagcaagcgcgtgccgataagaaagtgggcggctcgctggaagcggcagtaaccttgtatgcagaaccggaactggcggcgaaactgaccgcgctgggcgatgaattacgatttgtcctgttgacctccggcgctaccgttgcagactataacgacgcacctgctgacgcccagcagagcgaagtcctcaaagggctgaaagtcgcgttgagtaaagccgaaggtgagaagtgccctcgctgctggcactacacccaggatgtcggcaaggtggcggaacacgcagaaatctgcggccgctgtgtcagcaacgtcgccggtgacggtgaaaaacgtaagtttgcctgatgagtcaatcgatctgttcaacagggctacgctggctgtggctggtggtagtcgtgctgattatcgatctgggcagcaaatacctgatcctccagaactttgctctgggggatacggtcccgctgttcccgtcgcttaatctgcattatgcgcgtaactatggcgcagcgtttagtttccttgccgatagcggcggctggcagcgttggttctttgccggtattgcgattggtattagcgtgatcctggcagtgatgatgtatcgctcgaaggccacgcagaagctaaacaatatcgcttatgcgctgattattggcggcgcgctgggcaacctgttcgaccgcctgtggcacggcttcgttgtcgatatgatcgacttctacgtcggcgactggcacttcgccaccttcaaccttgccgatactgccatttgtgtcggtgcggcgttgatcgtgctggaagggtttttaccttctaaagcgaaaaaacaataataaaccctgccggatgcgatgctgacgcatcttatccggcctacagattgctgcgaaatcgtaggccggataaggcgtttacgccgcatccggcaaaaatcctcaaatataagagcaaacctgcatgtctgaatctgtacagagcaatagcgccgtcctggtgcacttcacgctaaaactcgacgatggcaccaccgccgagtctacccgcaacaacggtaaaccggcgctgttccgcctgggtgatgcttctctttctgaagggctggagcaacacctgttggggctgaaagtgggcgataaaaccaccttctcgttggagccagatgcggcgtttggcgtgccgtcaccggacctgattcagtacttctcccgccgtgaatttatggatgcaggcgagccagaaattggcgcaatcatgctttttaccgcaatggatggcagtgagatgcctggcgtgatccgcgaaattaacggcgactccattaccgttgatttcaaccatccgctggccgggcagaccgttcattttgatattgaagtgctggaaatcgatccggcactggaggcgtaacatgcagatcctgttggccaacccgcgtggtttttgtgccggggtagaccgcgctatcagcattgttgaaaacgcgctggccatttacggcgcaccgatatatgtccgtcacgaagtggtacataaccgctatgtggtcgatagcttgcgtgagcgtggggctatctttattgagcagattagcgaagtaccggacggcgcgatcctgattttctccgcacacggtgtttctcaggcggtacgtaacgaagcaaaaagccgcgatttgacggtgtttgatgccacctgtccgctggtgaccaaagtgcatatggaagtcgcccgcgccagccgtcgtggtgaagaatctattctcatcggtcacgccgggcacccggaagtggaagggacgatgggccagtacagcaacccggaagggggaatgtatctggtcgaatcgccagacgatgtgtggaaactgacggtcaaaaacgaagagaagctctcctttatgacccagaccacgctgtcggtggatgacacgtctgatgtgatcgacgcgctgcgtaaacgcttcccgaaaattgtcggtccgcgcaaagatgacatctgctacgccacgactaaccgtcaggaagcggtacgtgccctggcagagcaggcggaagtggtgctggtggtcggttcgaaaaactcctccaactccaaccgtctggcggaactggcccagcgcatgggcaaacgcgcgtttttgattgacgatgcgaaagatatccaggaagagtgggtgaaagaggttaaatgcgtcggcgtgactgcgggcgcatcggctccggatattctggtgcagaatgtggtggcacgtttgcagcagctgggcggtggtgaagccattccgctggaaggccgtgaagaaaacattgttttcgaagtgccgaaagagctgcgtgtcgatattcgtgaagtcgattaagtcattagcagcctaagttatgcgaaaatgccggtcttgttaccggcattttttatggagaaaacatgcgtttacctatcttcctcgatacagaccccggcattgacgatgccgtcgccattgcagccgcgatttttgctcccgaactcgacctgcaactgatgactaccgtcgcgggtaatgtctcggtagagaaaaccacccgcaacgccctgcaactgctgcatttctggaatgcggagattccgctcgcccagggagccgctgtgccgctggtacgcgcaccgcgtgatgcggcatctgtgcacggcaaatcgggaatggctggctacgactttgttgagcacaaccgaaagccgctcgaggtaccggcgtttctggcgattcgggatgccctgatgcgtgcaccagagcctgttaccctggtagccatcggcccgttaaccaatattgcgctgttactttcacaatgcccggaatgtaagccgtatattcgccgtctggtgatcatgggcggttctgctggtcgcggcaactgcacaccaaacgccgagtttaatatcgctgccgatccagaagcggcagcctgtgtcttccgtagcggcatcgaaatcgtcatgtgcggtctggatgtcaccaatcaggcaatattaacccctgactatctcgctactttgccggaattgaatcgcaccggaaaaatgctacacgccctgtttagccactaccgtagcggcagtatgcaaagtggactacgtatgcacgatctttgcgctatcgcctggctggtgcgcccggaattgttcactctcaaaccgtgttttgtcgcggtagaaactcagggtgaatttacctcaggcacgacggttgttgatatcgacggttgcctgggcaaaccagccaatgtacaggtggcgctggatctggatgtgaaaggcttccagcagtgggtggctgaggtgctggccctggcgctctaataataaaacaaggaagtgttctatgacgtatggagaagcgtatctggaagggtggaaaaacatctttaattatgaaggtgtttccaatcgcttcgagttctggtcgtttatgattggtagtggcgttatctgtctgcttccgcttttatgttggtggttagcggtaacaattaacaatgactatggtgttttcattttttttgcgctgcccgtgtcatttattttaacgttgatttttgccgtaccggcgatagcgttagccgtcagaaggatgcacgatatcggatattcagggtggtgggttaccattgccgtgttgatccctgttacgggcgtaattctgcttatactgtgctgcctgccgtcaaagtcacaagaccaggcataatgccagagggtatgacgcatcactttctgcgtcatgcctttcactgatatccctccctgtttatcattaatttctaattatcagcgtttttggctggcggcgtagcgatgcgctggttactctgaaaacggtctatgcaaattaacaaaagagaatagctatgcatgatgcaaacatccgcgttgccatcgcgggagccgggggccgtatgggccgccagttgattcaggcggcgctggcattagaaggcgtgcagctgggcgcggcgctggagcgcgaaggatcttctttactgggcagcgatgcgggcgaactggccggagccgggaaaacaggcgttactgtgcaaagtagtcttgatgcgataaaagatgattttgatgtgtttatcgattttacccgtccggaaggtacgctgaaccatctcgctttttgtcgccagcatggcaaagggatggtgatcggcactacggggtttgacgaagccggtaaacaggcgattcgtgacgccgccgccgatattgcgattgtctttgccgccaattttagcgttggcgttaacgtcatgcttaaactgctggagaaagcagccaaagtgatgggggactacaccgatatcgaaattattgaagcacatcatagacataaagttgatgcgccgtcaggcaccgcactggcaatgggagaggcgatcgcccacgctcttgataaagatctgaaagattgcgcggtctacagtcgtgaaggccataccggtgaacgtgtgcctggcaccattggttttgccaccgtgcgtgcaggtgacatcgttggcgaacataccgcgatgtttgccgatattggcgagcgtctggagatcacccataaggcatccagccgcatgacatttgctaacggtgcggtaagatcggctttgtggttgagtggtaaggaaagtggtctttttgatatgcgagatgtgcttgatctcaataatctgtaaccataagatatttattgtgatgcaaaaataacacatttaattcattgaatataaagggctttaatttttggcccttttatttttagtgttatgcttttaaatttaatgcaaatgctgaaaattacatattttgtattctgtttttgttgttttaatgtaaattttgaccatttggtccacttttttctgctcattttgatttcatgcaatcttcttgctgcgcaagcgttttccagaacatgttatatgatctttttgtcgcttaatgcctttaaaacatgcatgagccacaaaataatataaaaaatcccgccattaagttgacttttagctcccatatctccagaatgccgccgtttgccagaaattcgtcggtaagcagatttgcattgatttacgtcatcattgtgaattaatatgcaaataaagtgagtgaatattctctggagggtgttttgattaagtcagcgctattggttctggaagacggaacccagtttcacggtcgggccataggggcaacaggttcggcggttggggaagtcgttttcaatacttcaatgaccggttatcaagaaatcctcactgatccttcctattctcgtcaaatcgttactcttacttatccccatattggcaatgtcggcactaatgacgccgatgaagaatcttctcaggttcatgcccaaggtctggtgattcgcgacctgccgctgattgccagcaacttccgtaataccgaagacctctcttcttacctgaagcgccataacatcgtggcgattgccgatatcgatacccgtaagctgacgcgtttactgcgtgagaaaggtgctcagaatggctgcattatcgcaggcgataacccggatgcggcgctggcattagaaaaagcccgcgcgttcccaggtctgaacggcatggatctggcaaaagaagtaaccaccgcagaaccctatagctggacacaagggagctggacactgaccggcggcctgccagaagcgaaaaaagaagacgagctgccgtaccacgtcgtggcctacgatttcggtgccaagcgcaacatcctgcgtatgctggtggatagaggctgtcgcctgaccatcgttccggcgcaaacttctgcggaagatgtgctgaaaatgaatccagacggcatcttcctctccaacggtcctggcgacccggccccgtgcgattacgccattaccgccatccagaaattcctcgaaaccgatattccggtattcggcatctgcctcggccatcagctgctggcgctggcgagcggtgcgaagactgtcaaaatgaaatttggtcaccacggcggcaaccatccggttaaagatgttgagaaaaatgtggtgatgatcaccgcccagaaccacggttttgcggtggatgaagcaacattacctgcaaacctgcgtgtcacacataaatccctgttcgacggtacgttacagggcattcatcgtaccgataaaccggcgttcagcttccagggacacccggaagccagccctggtccacacgacgccgcgccgttgtttgaccactttatcgcgttaattgagcagtaccgtaaaaccgctaagtaatcaggagtaaaagagccatgccaaaacgtacagatataaaaagtatcctgattctgggtgcgggcccgattgttatcggtcaggcgtgtgagtttgactactctggcgcgcaagcgtgtaaagccctgcgtgaagagggttaccgcgtcattctcgtgaactccaacccggcgactatcatgaccgacccggaaatggctgatgcaacctacatcgagccgattcactgggaagtggtacgcaagattattgaaaaagagcgcccggacgcggtgctgccaaccatgggggggcagacggcgctgaactgtgcgctggagcttgagcgtcagggcgtgctggaagagttcggcgtcaccatgattggtgccactgccgatgcgattgataaagccgaagaccgccgccgtttcgacgtagcgatgaagaaaatcggtctggaaactgcgcgttccggtatcgctcattcaatggaagaagcgctggcggttgccgctgaagttggcttcccgtgcattattcgcccatcctttaccatgggcggtagcggtggcggtatcgcttataaccgtgaagaatttgaagaaatttgcgcccgcggtttggatctctccccgaccaaagagctgctgattgatgagtcgctgatcggctggaaagagtacgagatggaagtggtgcgtgataaaaacgacaactgcatcatcgtttgctctatcgaaaacttcgacgcgatgggtatccacaccggtgactctattactgtagcgccagcgcaaacactgaccgacaaagaataccaaatcatgcgtaacgcctcgatggcggtactgcgtgaaatcggcgttgaaaccggtggttctaacgtccagtttgcggtgaacccgaagaacggtcgcctgattgttatcgaaatgaacccgcgtgtgtcgcgttcttcggcgctggcgtcgaaagccaccggcttcccgattgccaaagtggcggcgaaactggcggtgggttacaccctcgacgagctgatgaacgacatcaccggcgggcgtactccggcctccttcgaaccgtccatcgactatgtggtcaccaaaattcctcgctttaacttcgagaaattcgccggtgcgaacgaccgtctgaccacccagatgaaatcggttggcgaagtgatggcgattggacgcacgcagcaggaatctctgcaaaaagccctgcgcggcctcgaagtgggcgcgactggcttcgacccgaaagtgagcctcgacgacccggaagcgctgactaaaatccgccgcgaactgaaagatgctggcgcagagcgtatctggtatatcgctgatgccttccgcgcgggcctgtctgtagacggtgtatttaatttgaccaacattgaccgctggttcctggtacagattgaagagctggtgcgtctggaagagaaagtcgcagaagtgggcatcactggcctgcacgctgaattcctgcgccagttgaaacgcaaaggctttgccgatgcgcgtctggctaaactggcgggcgtgcgcgaagcggaaatccgcaagttgcgcgaccagtatgatctgcacccggtttacaagcgcgtggatacttgtgcggcagagttcgccaccgacaccgcttacatgtactccacttatgaagaagagtgcgaagcgaatccgtccaccgatcgtgaaaaaatcatggtgctcggcggcggcccgaaccgtatcggtcagggtatcgaattcgactactgctgtgtacacgcctcgctggcgctgcgcgaagatggttatgaaaccattatggttaactgtaacccggaaaccgtctccaccgactacgacacctccgaccgcctctacttcgaaccggtaacgctggaagacgtgctggaaattgtgcgtattgagaagccgaaaggcgttatcgttcagtacggcggtcagaccccgctgaaactggcgcgcgcgctggaagctgctggcgtaccggttatcggtaccagcccggatgccatcgaccgtgcggaagaccgtgaacgcttccagcatgcggttgagcgtctgaaactgaaacaaccggcgaacgccaccgttaccaccatcgaaatggcggttgagaaagcgaaagagattggctacccgctggtggtgcgtccgtcttacgttctcggcggtcgggcgatggaaatcgtctatgacgaagctgacctgcgtcgctacttccagacagcggtcagcgtatctaacgatgcgccagtgttgctggaccacttccttgatgacgcagtagaagttgacgtggatgccatctgcgacggcgaagtggtgctgattggcggcatcatggagcatattgagcaggcgggcgtgcactccggtgactccgcatgttcgctgccagcctacaccttaagtcaggaaattcaggatgtgatgcgccagcaggtgcagaaactggccttcgaattgcaggtgcgcggcctgatgaacgtgcagtttgcggtgaaaaacaacgaagtctacctgattgaagttaacccgcgtgcggcgcgtaccgttccgttcgtctccaaagccaccggcgtaccgctggcaaaagtggcggcgcgtgtgatggctggcaaatcgctggctgagcagggcgtaaccaaagaagttatcccgccgtactactcggtgaaagaagtggtgctgccgttcaataaattcccgggcgttgacccgctgttagggccagaaatgcgctctaccggggaagtaatgggcgtgggccgcaccttcgctgaagcgtttgccaaagcgcagctgggcagcaactccaccatgaagaaacacggtcgtgcgctgctttccgtgcgcgaaggcgataaagaacgcgtggtggacctggcggcaaaactgctgaaacagggcttcgagctggatgcgactcacggcacggcgattgtgctgggcgaagcgggtatcaatccgcgtctggtgaacaaggtgcatgaaggccgtccgcacattcaggaccgtattaagaatggcgaatatacctacatcatcaacaccacctcaggtcgtcgtgcgattgaagactcccgcgtgatccgtcgcagtgcgctgcaatataaagtgcattacgacaccaccctgaacggcggctttgccaccgcgatggcgctgaatgccgatgcgaccgaaaaagtaatttcggtgcaggaaatgcacgcgcagatcaaataatagcgtgtcatggcggatatttttcatccgctaatttgatcgaataactaatacggttctctgatgaggaccgttttttttgcccattaagtaaatcttttggggaatcgatatttttgatgacataagcaggatttagctcacacttatcgacggtgaagttgcatactatcgatatatccacaattttaatatggccttgtttaattgctgcaaaacgagtcatagccagtcttttaatttgtgaaactggagttcgtatgtgtgaaggatgtgttgaaaaaccactctatttgttaatcgccgaatggatgatggctgaaaaccggtgggtgatagcaagagagatctctattcatttcgatattgaacacagcaaggcggttaataccctgacttatattctgtcggaagtcacagaaataagctgcgaagttaagatgatccctaataagctggaagggcggggatgccagtgccagcgactggtaaaagtggttgatatcgatgagcaaatttacgcgcgcctgcgcaataacagccgggataaattagtcggcgtaagaaagacgccgcgtattcctgccgttccgctcacggaacttaaccgcgagcagaagtggcagatgatgttgtcaaagagtatgcgtcgttaatgtcatttcgttgataccgtgcgacctggtcgctggatgcgatgctggcgcatcttatccggcctacggttgctttacagccaggtcggataaggcgtttatgccgcatccgacgatgttaccgtttcggcgtcacatccgtcgtcccctgcaaacgggggcgattttcctccatttgcctcagtggctgcgtttcatgtaacgctgcatgacagcgcccgacaagatcctgatactctttggtattcaaccgtttccagtgtaactcgtcgtcactcacgctgcgtacagcgcgggctggcgtacccatcaacaactggcgtttctcgccgcgaaagcccgctttgacaaagctcatagcggcaacaatgctctcttcgccaatgaccgcgccatccataatcacgctgttcatcccgaccagtgcatcgcgaccaatcacacaaccatgcaggatcgctccgtgcccgatatgaccgttttccccaacgatggtgtcagtgtcgcagtagccatgcataatgcagccatcctgaatattggctcccgcttgcacgatcaaccgcccgtagtcaccacgcagtgaggcgagtgggccgatgtagacaccggctcccacaatcacatcgccaatcaatactgcactgggatggacaaacgccgtcgggtgaacaaccggaattaacccctcaaaggcgtaatagctcacggttgttaacgtcctttccacactggatcgcgcttctcggcaaacgccagcggcccttcaatggcatcctccgaatgcagaaccgacggatagtgtttcaacacgccgctgcgaatatagcgatacgcttcttctaccggcatttcactggtggtgcggtagatctctttcagcgccgcaatcgccagcggagcgctgttaaccagctgctgcgccagttcgcgggcgttatccatcagttccgcctggctaaccacgcggttgactaccccccaacgcagcgcctcttctgcgcccattcgtctgccggtcatcaccatttcattgacgatggcaggcggcaggatcttcggcagacgcagcacgccgccgctgtcaggaacgatgcccagtttggcttccggtagggcgaagctggcgttatcggcacaaacaataaaatctgccgccagcgccagttcaaagccgccgccaaaggcatagccgttcacagcggcgatgaccggtttgtcgagattgaaaatttcggttaatcccgcaaaacctcccgggccaaagtcagcatccggtgcttcgccttctgctgccgcttttaaatcccagcccgcggaaaagaatttctctccggcaccggtaataatggcgacacgtaattgcggatcgtcacggaaatttagaaatacttcgcccatttcaaagctggtttttgcatcaatagcattcgcttttggacgatcaagggtaatttccagaattgatccattgcgggtcagatgtaatgattcactcattccttttctccatttttgctttttcagggacgacaacatccctgcaaaaaatgcatattgttttagagcgtgattattagctgacagggtagttccctgccgtttcatttatttcagattctttctaattattttccccgagcaattacgtggcagatcttttctgatctccagataagagggcactttaaatttcgccatattctgttcacagaagcagaagaattcctcttcgctcaatgtttcaccttcattcagcaccacaaatgctttgatggcttcatcgcgaatcgaatctttaatacccacaaccacgatatcctgaattttgggatgggtggcgatgatattttcgagctccacgcaggagacattctcgccaccgcgtttgatcatattgcagcggcgatcgacgaaataaaaaaagccctcttcgtcgcggtatccggtatcgccggtatgtagccagccatcggcttccagcactttcgcagtggctttcgggttgagaaaatactctttgaagatggttttccctggtacgcctttaatacagatttcaccgagctcaccagccgggaggggacgattgtgatcgtcgcggatctccgcttcgtagcaaaagcccgcccgaccaatcgacggccagcgccgtttatcgccagggcgatcgccgataatgcccacaatggtttccgtcatcccataagacgtcagcaagcgaacgctgaagcgttcacaaaacgcgtctttttcctgctccgacaggttgagataaaacatcacttcccgcaggcggtgttgctgatcgttcgctgaaagcggctgcaccatcaacgtacgaatcatcatcggaatacattcggtaatggtggcgcggtacttctgcacctgtccccagaaggcgcgggcgctgtatttctcgaccagcacaaaggtggccccggcagaaaacgccgccatcgccgcagtacactggcaatcgatatgaaacgcaggcattaccgtcaggtagacgtcatcgtcacgcagtgcacactgccaggcggagtaatatccagcgaagcgcaggttgtaatgagttatcaccacccctttcggtcgggaggtggtgccggaggtgaagagaatttccgccgtatcgtcagtcgatagcggcggtgcatagcacaaggtggcaggttgttgatttttcagttgagtaaacgaactcacgccatcatcagcgggaagtaccatatctgtcaggcaaatgtgccgcaactgagaggcatcttcctgctgaatctgttgatacataggataaaattgcgcactggtcaccagcaggcacgcctggctattttgcaggatccacgtgctttcttcgcgcaacaggcgggcgttaatcggcaccataatcgcgccaatttttgccaacccgaaccagcaaaagataaattccgggcagttgtcgagatgtagagcaaccttgtcgcctttgcgaatccccagcgtataaaacaggtttgccgtgcggttaatctcctgatttaactcaagataactataccggttaacgactccgctgctggattcacaaatcagcgccgttttatgaccgtaaacgtccgccagatcgtcccacatttgacgtagatgttgtccgccaatgatatccattgcacctctatccattttgttcgtttgttattgggcgggcgctagtcaggcaagttgactgacgccacgcgtttagtcctcaactttggccagacctttgctgaccaactcctgaatgtcgttttcgctgtagccgatatttttcaaaatggcagccgtgtccatgccatgtgagggcattccgcgccagatttgtccggggttatttttgaatttcggcatgatattcggccctttgcaggtgcgaccatccatcgtttgccactgagtgattgattcgcgagccacatactgtggattgctttccagttccggtacggtaagtactttggcacaggcgatattcagttcggcaaagcgttctttaacttctgcgatggtatgtgccgccagccaggcatcgagtttctcttctaccagtgggccgtaagggcattcgatacggtgtataagttgagtgccttccggaatttctggcgtgccgagcagatgcgcgaggccaatatctttaaagcactctgcaatttgagtaatgcccaccagttccatcacgatgtagccgtcggcgcatttatacagaccgcaaccggcgtagtagggatctttacctttggtcatgcgcgggcacatttcgccgccgttgaagtaatccatcatgaagtactggcccatgcgcaacatcacttcatacatggcgatgtcgatgctttcgcctttgccggtttcacgcactttatgcagtgctgcaagcgccgccgtggtggcggtcaggccagaaaagtaatcggcggtatacgggaaggcaggcattggctggtcaacatcaccgttctgaatcaggtaaccactgaaggcctgggcgatagtgttataggccggaagattggtgtactcctcggtgccatactgaccaaaaccggaaaggtgagcgataaccagttttgggttgtgctgccacaggacttcatcggtaatgccacgacgggcaaaggccggacctttactggcttcgatgaagatatcggtggtttccattaatttcagaaacgcttcgcgcccttcatctttgaaaatatttaacgacagcgcatgcaaattgcggcgggagagctgcgggtagttcggttgaacgcgaatggtgtcggcccaggcgacgttctcgatccagataacttccgccccccattctgcgaacatttgtccggcgaacggcccggcgatttcgataccggagaagacaacgcgtaatccggccagcggcccgaatttcggcatgggtagatgatccattattagctcctgaaaaatttatgtagcgcatgactgccggatgcggcgtaaacgccttatccggccatcttcgtgctcccgtaggcctgataagacgcgtcagcgtcgcatcaggcagcgcacggacttaacggtattgcttcagcaccgcgcgacccagcgtcaggatctgcatttcgtcagatcctccggaaacgcggtctacacgcaggtcacgccagaagcggctgatgcggtggttgcccgcaatcccgacaccgcccagcacctgcattgcgctatccaccacttcaaatgccgcattggcgcagaagtatttgcacatcgctgcatcgccagaggtgatggtgccgttgtctgctttccacgctgcttcatacagcatgtttttcatggagtttaatttgatcgccatgtgggcgaatttttcctgaatcaactggaaacgaccaatagcctcgccaaactgcacgcgctggttggcgtagcgcgccgcatcttcaaaggcgcacatcgccgtaccgtagttggtcagggctaccaggaaacgttcatggtcgaactcttctttgacgcggttaaagccgttaccttcccgaccgaacatgtctttctcgtccagttccacgtcgtcaaaagtgatttcacagcagctatccatacgcagaccgagcttttcaagtttggtcactttgatgcccggtttgctcatatcaacaaaccattcggtgtagacaggtttgtccggagaagccccgtcgcgcgccatcaccacgatgtacggggtgtaggcgctactggtaataaaacacttactaccattaagataaatcttaccatttctacgggtataagtcgttttcaggctacccacgtcggagcctgcgcccggttcggtaatcgctgagttccacatctgcttaccggtgccgcggaaagccatgatcttgtcgatctgctcttgcgtaccttcacgcaggaaggtgttaaacccgcccggtaactgatacagcacgtaagttggcgctcccagacgacccagttccatccacacggcggcgagagtaacaaaccccgcgtccagaccaccgtgctcttcagggatcagcagactgtcgatacccatatccgccagggctttgacaaaacgttccgggtagacgctgtcacggtcgcactcggcaaaataggcttcccagttttcgctggccatcagttcgcggataccggcgacaaacagttcctgctcatcatttaaattaaaatccatctttcaacctcttgatattttgggggttaattaatctttccagttctgtttcgcgtctttaataaaggagagcgtcaccatgatgttgacgaagaacagcgggcatcctccggcgataatggcggtttgaatcggtttcaggccgccgagcgccagcagaacaataccgataatgccaaccagaactgaccaaccaatgcgcaccagcagcgggggttcttcgccgtcacgcacttcgcggcaagtggacatcgccagggtataagagcaggcgttaaccagcgtaacggtggcaataaagcagaggatgaagaagccccacatggtggcggtgctgagtggcagagcggcccaggtttcgatgatggcgcgcgccacaccgtactgttcgatcagatttggaatgttgatgatgtttttatctatcaacagcagagtgttactaccgagtacagtccacaggatccatgttgacgctgtcagccccagcaccatgccgaagcacagttcacgcacggtacgaccacgggagatgcgggcgaggaagatactcatctggatagcgtaaatcacccaccatgcccagtagaacacggtccagccctgcgggaagccgcctttagcgatgggatcggtatagaacaacatgcgcggcagatacatcagcaacatccccaccgaatcggtgaagtagttcatgatgaagctggcaccgctgacgatgaacacccaacccagcatcaggaagctcaggtaactacgcacgtcactggcgatacgtacccctttttgcagaccgcaagcgacgcaaatggcgttgaggataatccagcaggtaatgatgatagcgtccagttgcagggtatgcggaatgccaaacaaccattgcatacactcggtcaccagcggcgtggcaaggcccagactggtacccatcgcgaagatcaaggcgacgagatagaagttgtcgacgatagtgccgaacaaccctttggcgtgtttttcacctaccagcggcaccagggtggagctggggcgaatcacttccattttgcggacaaagaagaagtaagcgaaggcgactgaaaggaagctgtaagtggcccacggcagaggtccccagtggaacaagctgtaagccagccccaactctttcgcgcctgttgagttcggttctaagccaaacggcggggtggagatgtagtagtagatctcaatcgatccccagaacagtacggcagcagacgtacaggaggcgaacatcataaagatccaactggcggtactaaattctggtggttcgttacctaaacgctttttggcatacgggccaaacaccagccagaaccagccgaaaagcatcaccaccatataccattcaaatgcccatccccatacattggtgacgtaactgaatacagcattaataacgacattcgccgcatccagatctctgactgtaagccaacaaagtatgccgacgattattaacggcggaaagaaaaccttcggttctattcccgtttttctcttttcattcttcatgagttaattccactgtgaaaacgaacatttattttgcgttcccgtttgttttatttttgttaacatttaatataattattattaacctcgtggacgcgttaatggctaactcataatgggtattcaataagctgcattctgtgattgttatcacatttttgtttcgggtgaatagagggcattttttcgttaattttgattattaatcagtttgttatgttctgttgtgagtaaaaaaatagcatctgactttcaatattggtgatccataaaacaatattgaaaatttcttttttctacgccatgttttcaatattggtgaggagcttaacaatattgaaagttggatttatctgcgtgtgacattttcaatattggtgattaaagttttatttccaaattaaagggcgtgatatctgtaattaacaccaccgatatgaacgacgtttccttcatgatttctggagatgcaatgaagattattacttgctataagtgcgtgcctgatgaacaggatattgcggtcaataatgctgatggttcgttagacttcagcaaagccgatgccaaaataagccaatacgatctcaacgctattgaagcggcttgccagctaaagcaacaggcagcagaggcgcaggtgacggccttaagtgtgggcggtaaagccctgaccaacgccaaagggcgtaaagatgtgctatcgcgcggtccggatgaactgattgtggtgattgatgaccagttcgagcaggcactgccgcaacaaacggcgagcgtactggctgcagccgctcagaaagcaggctttgatttgatcctctgtggcgatggttcttccgacctttatgcccagcaggttggtttgctggtaggcgaaatccttaatattccggcagttaacggcgtcagcaaaattatctccctgactgcagataccctcaccgttgagcgcgaactggaagatgaaacagaaaccttaagcattccgctgcctgcggttgttgctgtttccactgatatcaactccccacaaattccttcgatgaaagccattctcggcgcggcgaaaaagccagtccaggtatggtcggcggcggatatcggttttaacgcagaggcagcctggtcagaacaacaggttgccgcgccgaaacagcgcgagcgtcagcgcatcgtgattgaaggcgacggcgaagaacagatcgccgcatttgctgaaaatcttcgcaaagtcatttaattacaggggatgctatgaacacgttttctcaagtctgggtattcagcgataccccttctcgtctgccggaactgatgaacggtgcgcaggctttagctaatcaaatcaacacgttcgtcctcaatgatgccgacggcgcacaggcaatccagctcggcgctaatcatgtctggaaattaagcggcaaaccggacgatcggatgatcgaagattacgccgatgtcatggctgacactattcgccagcacggcgcagacggtctggtgctgttgccaaacacccgtcgcggcaaattactggcggcgaaactgggttaccgccttaacgcggcggtgtctaacgatgccagcgctgttagcgtgcaggacggtaaagcgacagtgaaacacatggtttacggcggtctggcgattggcgaagaacgcattgccacgccgtatgcggtactgaccatcagcagcggcacgttcgatgtggctcagccagacgcgtcacgcactggcgaaacgcacaccgtggagtggcaggctccggctgtggcgattacccgcacggcaacccaggcgcgtcagagcaacagcgtcgatctcgacaaagcccgcctggtggtcagcgttggtcgcggtattggcagcaaagagaacattgcgctggcagaacagctttgcaaggcgataggtgcggagttggcctgttctcgtccggtggcggaaaacgaaaaatggatggagcacgaacgctatgtcggtatctccaacctgatgctgaaacctgaactgtacctggcggtggggatctccgggcagatccagcacatggttggcgctaatgcgtcgcaaaccattttcgccatcaacaaagataaaaatgcgccgatcttccagttcgcggattacggcattgttggcgacgccgtgaagatccttccggcactgaccgcagctttagcgcgttgatccactctggcagggagctcttatgtccgaagatatctttgacgccatcatcgtcggtgcagggcttgccggttcggttgccgcactagtgctcgcccgcgaaggtgcgcaagtgttagttatcgagcgaggcaattccgcaggtgccaagaacgtcaccggcgggcgtctctatgcccacagtctggaacacattattcctggtttcgctgactccgcccccgtagaacgcctgatcacccatgaaaaactcgcgtttatgacggaaaagtcagcgatgactatggactactgcaatggcgacgaaacctcgccatcccagcgttcttactccgttttgcgcagtaaatttgatgcctggctgatggagcaggctgaagaagcgggcgcgcagttaattaccgggatccgcgtcgataacctcgtacagcgcgatggcaaagtcgtcggtgtagaagccgatggcgatgtgattgaagcgaaaacggtgatccttgctgatggggtgaattccatccttgccgaaaagctggggatggcaaaacgcgttaaaccgacggatgtggcggttggcgtaaaggaactgatcgagttaccgaagtcggttatcgaagaccgttttcagttgcagggtaatcagggcgcggcttgcctgtttgcgggatcacccaccgatggcctgatgggcggtggcttcctttataccaatgaaaataccctgtcgcttgggctggtttgtggtttgcatcatctgcatgacgcaaaaaaatcggtgccgcaaatgctggaagatttcaaacaacatccggccgttgcaccgctgatcgcgggcggcaagctggtggaatattccgctcacgtagtgccggaagcaggtatcaacatgctgccggagttggttggtgacggcgtattgattgccggtgatgctgccggaatgtgtatgaacctcggttttaccattcgcggtatggatctggcgattgccgccggggaagcagcagcaaaaactgtgctttcagcgatgaaaagcgacgatttcagtaagcaaaaactcgcggaatatcgtcagcatcttgagagtggcccgctgcgcgatatgcgcatgtaccagaaactaccggcgttccttgataacccacgcatgtttagcggctacccggaactggcggtgggcgtggcgcgtgacctgttcaccattgacggcagtgcgccggaactgatgcgcaagaaaatcctccgccacggcaagaaagtgggcttcatcaatctgatcaaggatggcatgaaaggagtgaccgttttatgacttctcccgtcaatgtggacgtcaaactgggcgtcaataaattcaatgtcgatgaagagcatccgcacatcgttgtgaaggccgatgctgataaacaggccctggagctgctggtgaaagcgtgccccgcaggtctgtacaagaagcaggatgacggcagtgtgcgcttcgattacgccggatgtctggagtgcggcacctgtcgcattctggggctggggtcggcgctggaacagtgggaatacccgcgcggcacctttggtgtggagttccgttacggctgatgttggtttgatacgtaatgccgtactgactctcattgcaaaaaaacaggaataacccatgcaaccgtccagaaactttgatgatcttaaattctcctctattcaccgccgcattttgctgtggggaagcggtggtccgtttctggatggttatgtactggtaatgattggcgtggcgctggagcaactgactccggcgctgaaactggacgctgactggattggcttgctgggcgcgggaacgctcgccgggctgttcgttggcacatcgctgtttggctatatctccgataaagtcggacggcgcaaaatgttcctcattgatatcatcgccatcggcgtgatatcggtggcgacgatgtttgtctcatcccccgtcgaactgttggtgatgcgggtacttatcggcattgttatcggtgcggattatcccatcgccacctcaatgatcaccgagttctccagtacccgtcagcgggcgttttccatcagctttatcgccgcgatgtggtatgtcggcgcgacctgcgccgatttggtcggctattggctttatgatgtggaaggcggctggcgctggatgctgggtagcgcagcgattccctgtttattgattttgattggtcgattcgaactgcctgaatctccccgctggttgttacgcaaagggcgagtaaaagagtgcgaagagatgatgataaaactgtttggcgaaccggtggctttcgaggaagagcagccgcagcaaacccgttttcgcgatctgtttaatcgccgccattttccttttgttctgtttgttgccgccatctggacctgccaggtgatcccaatgttcgccatttacacctttggcccgcaaatcgttggtttgttaggattgggggttggcaaaaacgcggcgctggggaacgtggtgattagcctgttctttatgctcggctgtattccgccgatgctgtggctaaacactgccggacggcgtccattgttgattggcagctttgccatgatgacgctggcgctggcggttttggggctgatcccggatatggggatctggctggtagtgatggcctttgcggtgtatgcctttttctctggcgggccgggtaatttgcagtggctctatcctaatgaactcttcccgacggatatccgcgcctctgccgtgggcgtgattatgtccttaagccgtattggcactattgtatcgacctgggcactgccgatctttatcaataattacggtatcagtaacacgatgctaatgggggcgggtatctcgctgtttggcttgttgatttccgtagcgtttgccccggagactcgagggatgtcactggcgcagaccagcaatatgacgatccgcgggcagagaatggggtaatttgttcagatttctctcttttctgaatcaatattattgactataagctgcgtgaatatatgactacactttgtgggaaaacaaaggcgtaatcacgcgggctacctatgattcttataatttatgcgcatccatatccgcatcattcccatgcgaataaacggatgcttgaacaggcaaggacgctggaaggcgtcgaaattcgctctctttatcaactctatcctgacttcaatatcgacattgccgccgaacaggaggcgctgtctcgtgccgatctgatcgtctggcagcacccaatgcagtggtacagcattcctccgcttcttaaactttggatcgataaagttttctcgcacggctgggcttacggtcacggcggcacggcgctgcacggcaaacatttgctgtgggcggtgacgaccggcggcggggaaagccattttgagattggtgcgcatccggggtttgatgtgctgtcgcagccgctacaggcgacggcaatctactgcgggctgaactggctgccaccgtttgccatgcactgcacctttatttgtgacgacgaaaccctcgaagggcaggcgcggcactataagcaacgtctgctggaatggcaggaggcacatcatggatagccatacgcttattcaggcgctgatttatctcggttcggcggcgctgattgttcccattgcggtacgtctcggtctgggatcggttcttggctacctgatcgccggctgcattattggcccgtgggggctgcgactggtgaccgatgccgaatctattctgcactttgcagagattggcgtggtgctgatgctgtttattatcggcctcgaactcgatccacaaaggctgtggaagctgcgtgcggcagtgttcggcggtggcgcattgcagatggtgatttgcggcggcctgctggggctgttttgtatgttacttgggctgcgctggcaggtcgcagaattgatcggcatgacgctggcgctctcctctacggcgattgccatgcaggcgatgaatgaacgcaatctgatggtgacgcaaatgggccgcagtgcctttgcggtgctgctgttccaggatatcgcggcgatcccgctggtggcgatgatcccgctactggcagcgagcagtgcctcgacgacgatgggcgcatttgttctctcggcgttaaaagtggcgggcgcgctggcgctggtggtattgctggggcgctatgtcacgcgtccggcactgcgttttgttgcccgctctggcttgcgggaagtgtttagtgccgtggcgttattcctcgtgtttggctttggtttgctgctggaagaggtcggcttgtcgatggcgatgggcgcgtttctggcgggcgtactgctggcaagctcggaataccgtcatgcgctggaaagcgatatcgaaccatttaaaggtttgctgctggggctgtttttcatcggcgttggcatgtcgatagactttggcacgctgcttgaaaatccgttgcgcattgttattttgctgctcggcttcctcatcatcaaaatcgccatgctgtggctgattgcccgaccgttgcaggtgccaaataaacagcgtcgctggtttgcggtgctgttaggacagggcagtgagtttgcctttgtagtatttggtgcggcgcagatggcgaatgtgctggagccagagtgggcgaaatcgctgactctggcggtggcactgtcgatggcggcaacgccgattctgctggtgatcctcaatcgccttgagcaatcttctactgaagaggcgcgtgaagccgatgagatcgacgaagaacagccgcgggtaatcattgccggattcgggcgttttgggcagataaccggacgtttactgctctccagcggggtgaaaatggtggtgctcgatcacgacccggaccatatcgaaacgctgcgtaaattcggtatgaaagtgttttatggtgatgccacgcggatggatttactggaatctgccggagcggcgaaagcggaagtgctgattaacgccatcgacgatccgcaaaccaacctgcaactgacagagatggtgaaagaacatttcccacatttgcagattattgcccgcgcccgcgatgtcgaccactacattcgtttgcgtcaggcaggcgttgaaaagccggagcgtgaaaccttcgaaggtgcgctgaaaaccgggcgtctggcactggaaagtttaggtctggggccgtatgaagcgcgagaacgtgccgatgtgttccgccgctttaatattcagatggtggaagagatggcaatggttgagaacgacaccaaagcccgtgcggcggtctataaacgcaccagcgcgatgttaagtgagatcattaccgaagaccgtgaacatctgtcattaattcaacgacatggctggcagggaaccgaagaagggaaacatactggcaatatggcggatgaaccggaaacgaagccctcatcctaataaagagtgacgtaaatcacgctttacagctaactgtttgtttttgtttcattgtaatgcggcgagtccagggagagagcgtggactcgccagcagaatataaaattttcctcaacatcatcctcgcaccagtcgacgacggtttacgctttacgtatagtggcgacaattttttttatcgggaaatctcaatgatcagtctgattgcggcgttagcggtagatcgcgttatcggcatggaaaacgccatgccgtggaacctgcctgccgatctcgcctggtttaaacgcaacactttaaataaacccgtgattatgggccgccatacctgggaatccatcggtcgtccgttgccaggacgcaaaaatattatcctcagcagtcaaccgggtacggacgatcgcgtaacgtgggtgaagtcggtggatgaagccattgcggcgtgtggtgacgtaccagaaatcatggtgattggcggcggtcgcgtttatgagcagttcctgccgaaagcgcaaaaactgtatctgacgcatatcgacgcggaagtggaaggcgacacccatttcccggattacgagccggatgactgggaatcggtattcagcgaattccacgatgccgatgcgcagaactctcacagctattgctttgagattctggagcggcggtaattttgtatattagaattccggcatcactgatacgtgcagatatccgtgtatactagacgtataaattgtacaggagcacgagatcatgactgcaaaacgtaccacacaaagtgtgaccgtcaccgtcgaccgtgagttagtcaatcgcgctcgtgatgcaggcttaaatatgagcgccacccttacggttgcgctcaatgctgaacttaaaaaacatgcagcaacacgttggcgtgaagagaacgcagaagctatcgctgcgttaaatcaattggctgatgaaaccggatgtttctctgatgagtaccggagcttctagcgatgcaatttacggtataccgcagtcgcggcaggaacgccgcgtttccctttgttattgatgttaccagcgacattattggtgagattaatcgccgtatcgttattccattaacacctattgaacgatttagccgtattcgcccaccagaacggcttaacccaatccttttactggtagacggcaaagaatatgtgctcatgacgcatgagactgcaactgttccagttaacgcgctgggaacgaaattttgcgatgccagcgcgcaccgaacgttgattaaaggagcattagattttatgctcgacgggatttaagacgctaccgcctctccctcacccatatctttatgccggttcgacggctggacaaaatactgtttatcttcccagcgcaggcaggttaatgtaccaccccagcagcagccggtatccagcgcgtaaataccttccggcgtacctttgccttccagcgatgcccagtgaccaaaggcgatgttgtactcttcagcgacggggccaggaatcgcaaaccacggtttcagtggggcaggggcctcttccggcgattctttgctgtacatatccagttgaccgtttggaaagcaaaagcgcatacgggtaaaggcgttggtgataaaacgcagtcttcccagcccccgcaattccggtgaccagttatttggcatatcgccgtacatggcatcaaggaagaagggataggagtcactcgacagcaccgcttctacatcgcgcgcgcactctttggcggtctgcagatcccactgcggcgtgatcccggcgtgggccatcaccaactttttctcttcgtcgatttgcagcaaaggctggcgacgcagccagttaagcagctcgtcggcatccggcgcttccagcagcggtgtcaggcgatctttcggtttattgcggctgatcccggcaaataccgccagcagatgcagatcgtgattacccagcaccagacgtacgctgtcgcctaaggatttcacatagcgcagaacatccagcgaacccgggccgcgcgcgaccagatcgcccgtcagccagagggtatctttcccaggggtaaattctactttatgcagcaatgcgatcagttcatcgtaacaaccatgaacgtcgccaataaggtatgtcgccatattcttttaatgaatgagtgtgggaacggcgagtcggaatacgggaatgtcgatgctgaaagggacgccattttcatcgatcatttcgtagtgaccctgcatggtgcccagcggggtttcaatgattgcaccgctggtgtactggtactcttcgccaggcgcgataagtggctggacgccaaccactccttcgccctggacttcggtttcacggccattgccattggtgatcagccagtaacgccccaacaactgcactggcgctcgccccagattgcgtatggttacggtataagcaaaaacgtaacgttcattatcaggtgaagattgggcctcaatgtagacgctttgaacctgaatacacactcggggcgaattgatcatcgttaactctcctgcaaaggcgcgttctccgccagatagttcgccatctggcaatattgcgcgacagagatattttccgctcgcatcgccgggtcgatccccattcccgttaacacctcgacgctaaacaggttgccgaggctgttacgaatggttttacgacgctggttaaaggcttcagtggtgatgcggctcaacacgcgaacatctttaaccgggtgaggcatcgttgcatgaggaaccaggcgcacgacggcggaatccactttgggtggtggtgtaaaggctgacggcggtacttccagcaccgggatcacgttgcaatagtattgcgccatgacgcttaatcgaccatacgccttgctgttcggtcctgcaaccagacgattcaccacttctttttgcaacataaagtgcatgtcggcaatggcatcagtatagctaaacagatggaacatcaacggcgtggagatgttataaggcaggttgccgaaaacacgcagcggctggcccattttcgcggccagttcgccaaagttaaaggtcatcgcatcctgctgataaatcgtcagtttcgggcctaagaatggatgcgtttgcagacgtgccgccagatcgcggtcaagttcgatgaccgtcagctggtccagacgttcgccgaccggttcggtcaatgccgccagaccggggccgatttcgaccatcgcctggcccttctgcgggttaatggcagaaacaatgctgtcgatcacgaactgatcgttgagaaagttttgcccgaagcgtttacgggctaagtggccctggtggactcgattattcattgggtgttaacaatcattttgatggcgagattaagcgccgtaataaaactgccgacatcggctttaccacgtcccgccagttcaagcgcggtgccgtggtccactgatgtgcgaataaagggcaggcccagcgtaatgttcacaccgcgcccgaagccctggtattttagcacgggaagaccctgatcgtggtacatcgccagcacggcgtcggcgttatcgagatatttcggctgaaacagggtatcggcaggcagcggcccgttgagtttcatcccctgttcccgcagctcgttgagtaccggaataatggtgtctatctcttccgtacccatatgaccgccttcgcccgcgtgcggattcagcccgcagaccagaatgcgcggttcggcaataccaaatttggtgcgcaaatcgtgatgcaaaatagcaatcacttcgtgcaaaagggcaggggtgatagcatctgcgatatcgcgcagcggtaaatgcgtcgttgccagcgccacgcgaagttcttcggtcgccagcatcatcaccacttttttcgcctgcgaacgctcttcgaaaaactcggtatgaccggtaaacggaatgcctgcgtcgttaatgacgcctttatgcacggggcctgtgatcagcgcagcaaattcaccgttcagacagccatcacacgctcgcgccagcgtttccaccacatagtgcccattttcaactgctaactgccccacagtgacagattcacgtagcgcgacaggaagtagcgttaatgtgcccgcagtttgcggttgtgcaggggagttgggggaataagggcggagggtgagcggcaaaccgagcatcgctgcccggtcggtaaggagagtggcatcggcacaaacaaccagttcgactggccactcacgctgtgcaagctggacaattaagtccgggccaatcccggcgggctcgccgggagtgatcacaacacgttgggttttaaccattagttgctcaggattttaacgtaggcgctggcacgttgttcctgcatccagcttgctgcttcttccgagaacttacggttcatcagcatgcggtatgcacgatctttctgtgccgcgtcggttttatcgacattacgggtatccagcagttcgattaaatgccagccgaatgaagagtgaaccggtgcactcatttgacctttgttcaggcgggtcagggcgtcacggaaggccggatcgaaaatatctggtgtagcccagccgagatcaccgccctggttagcagagcctggatcctgagagaactctttcgctgcggcagcaaaagtcgttttaccactcttgatatcggcagcaatctgttccagtttcacgcgggcctgttcgtcagtcatgatcggcgacggtttcagcagaatatggcgagcatgaacttcggtcaccgagatatttttgctttcgccgcgcaggtcgttaactttcagaatatggaagccaacgccggaacgaatcgggccaacaatgtcgcctttcttcgcggtgcttaatgcctgggcgaagatccccggcaactcctgaatacggccccagcccatctgtccgccgttcagcgcctgctggtcggcagaatgagcaatcgccagcttaccgaaatcagcgccgttacgcgcctgatcgacaatcgcgcgcgcctggctttccgcttcgttcacctgatcagaggtcgggttttccggcagtgggatcaggatgtggctcaggttcagctcagtgctggcgtcgttttggttacccacttgctgcgccagggattcgacttcctgcggcaggatggtgatgcgacgacgcacctcgttgttacgcacttcagagataatcatctctttgcggatctggttacgataggtgttgtagttcagaccatcgtaagccagacggctgcgcatctgatccagcgtcatgttgttctgtttcgcgatgttagcaatcgcctgatccagctgctcatcggagattttcactcccattttctgccccatctgcaggatgatttgatccatgatcaaacgctccatgatttggtggcgcagcgtcgcgtcatcaggaagttgttgccttgcctgagcagcgttcagttttaccgactgcattaatccatcaacgtcgctttccagcacgacgccgttattgacgacggctgcgactttatcgactacctggggggcagcgaaactggtattcgcgatcatggcgataccgagaagcagcgttttccagttcttcatactttttccatttcaattaaccgcactgcggattacgtggtaaatcaacaaatcacaaagtgttttgatacggcagaatgttcgaacgcagcatctcttgcgtacccagaccgtagttggagctcaggccgcgaagttcgatgttaaagccgattgcgttgtcatataccgcatgttgtttatcgttatcccaaccgttcagcttccgctcgtaaccgacgcgaatcgcatagcagcaggagctgtattgcacacctaacatagagtcggcttgcttgttcgcattggtgtcgtagtagtaggccccaacaatggaccaacgatcggcaattggccagctggcgacggctcctacctgcgaaataccattcttatattgctcagcagtggaatagtacttaggcagcgttgcctgaatatattccgggctggcgtaacggtaattcagctgtaccagacggtcttcatcccgacggtattcaatgctggagttactggtcgctacgttatccagacgtgtatcgtactgaatcccgccacgcaatccccaacgatcagagatgcgccagtaagtatcgcctgcccataccagtgagcccgttttgtcgtcattctcccatgttatgttgtcatcgccagtgcgagactccgtgaaatagtagatttgaccaacggaaatattaaaacgttcaacggcagcatcatcatatatgcgagatgtgacaccggtcgtcacctggttagcggaggcaatacggtcaagaccgccgtaagtccggtcccggaacaggccggagtagtcagattgcagcagagacgagtcgtagttatagattttgctctgatcgcgatatggcacatacagatactgcgcgcgtggttccagtgtctgggtatagcccggcgccagcatttccatatcacgctcgaagaccattctaccgtctaccttgaactgcggcattacacggttagcggactctgccagcttggtcgtgtttctggagttataccagtcaagattggtttgctgataatgggttgccagcaacttcgcttcagtattgatgctgccccagttattagagagcggcagattgatggtcggttccaggtgaacacgagtcgcctctggcatgtcatctctggtgttaacaaagtgcactgcctggccgtaaatacgcgtatcaaacggaccaacatcattctggtagtagttaacgtctaactgcggctctgccgagtagctactggtgttctgctcgctgaagacctggaactgcttggttgaaacggtggcattgaagttttgcaccgcatagccaacgctgaatttttgcgttgcgtagccgtcggtactggaaccgtatttgttatcgaagtcattgaagtagctaggatcgctgactttggtgtagtcgacgttgaaacgccacacctgatccatgaccccggagtggttccagtagaacaaccaacgacgtgaactgtcatcgttcgggtgttcatctttatagactttatctgaaggcagatagtccagttccatcaagccagcgcccgcctgggagaggtagcggaattcgttctcccacatgatgttgccacgacgatgcatataatgcggcgtgatggtggcatccatatttggcgcgatgttccagtaatatggcaggtagaactcaaagtagttggtggtggtgtatttggcgttcgggatcaagaaaccagagcgacgtttgtcacccaccggcaactgcaaatacgggctataaaagatcggtaccggacccaccttaaagcgggcgttccagatctccgcaacttgttcttcgcggtcatgaataatttcgctacctaccacgctccaggtgtcagaacccggcagacaggaggtaaagctaccgttatccagaatggtatagcggttttcgccacgttgtttcatcaggtccgctttaccgcgaccctggcgacccaccatctggtaatcaccctcccagacgttggtatctttggtgttcagattcgcccagcctttcggccctttgaggatcacctggttatcgtcgtaatggacattaccgagcgcatcaacggtacgtaccggctccggttgtcctggtgcctctttttgatggagctgcacttcgtcggcctgcagacggctgttaccctgcatgatatccacgctgccagtaaacacggcgtcatccgggtagtcccctttcgcgtggtcagcattgatagtcacgggtaagtcattggtatcgccctgtaccagaggacggtcatagcttggcacgcccaacatgcactgtgaggcgaggtcggctgccagtccctgttgactataaagggcggtggcaatcatggtggccaggagagtggggatacgttttttcatacgttgattttattgttccatcatcggtaacgttgcgcgtgacaaacggtcagagactaacgtactcgtcatctctacgctagtgttaatcctgtccgaatagcgtctgtggtgttaggcacggcattgaatgacaggtatgataatgcaaattataggcgatgtctcacaatagaccgcagccagaaatgggtaaaagcgcctttatattgtgggagatagccctgatatccgtgtgtcgatttggggaatatatgcagtattggggaaaaatcattggcgtggccgtggccttaataatgggcggcggcttttggggcgtagtattgggcctgttaattggccatatgtttgataaagcccgtagccgtaaaatggcgtggttcgccaaccagcgtgagcgtcaggcgctgttttttgccaccacttttgaagtgatggggcatttaaccaaatccaaaggtcgcgtcacggaagctgatattcatatcgccagccagttgatggaccgaatgaaccttcatggcgcttcccgtactgcggcgcaaaatgcgttccgggtgggaaaatcagacaattacccgctgcgcgaaaagatgcgccagtttcgcagtgtctgctttggtcgttttgacttaattcgtatgtttctggagatccagattcaggcggcgtttgctgatggttcactgcacccgaatgaacgggcggtgctgtatgtcattgctgaagaattagggatctcccgcgctcagtttgaccagtttttgcgcatgatgcagggcggtgcacagtttggcggcggttatcagcagcaatctggcggtggtaactggcagcaagcgcagcgtggcccgacgctggaagatgcctgtaatgtgctgggcgtgaagccgacggatgatgcgaccaccatcaaacgtgcctaccgtaagctgatgagtgaacaccatcccgataagttggtggcgaaaggtttgccgccagagatgatggagatggcgaagcagaaagcgcaggaaattcagcaggcctatgagctgataaagcagcagaaagggtttaaataagtttcaacgtgtaggcctgataagacgcggcccgcgtcgcatcaggcaatcggcgcaaaattgccggatgcggcgtgaacgccttctccggcctaccgaacttcgccagcgtgactattaaaaatccgctggtgctttaaatgtcatactattgccatacgccggatgggtaatcgtcagcatctctgcatgtagcaacaaacgtggtgccattgctctcgcttctggtgatgcataaaaacgatcgccgagaatcggatgacccagcgccagcatatgcacacgcagctgatgcgaacgcccggtaatcggttttaacaccactcttgccgtgttatccgccgcatattccaccacttcatactccgtctgcgcaggtttacctgtttcgtaacagactttctgtttcgggcggtttggccagtcgcaaatcagcggcagatccaccagaccttccgcaggggatggatgcccccagacgcgggccacatactgttttttcggctcgcgctcgcggaactggcgttttaactcccgctccgcggctttggtcagcgccactacaatcacgccgctggtagccatatccagacgatgcaccgattctgcctgcggataatcacgctgaatgcgcgtcatcacgctgtctttgtgctcttccagacgccccggcacagacaacaaaccgctcggcttgttgaccaccataatatggtcatcctgatacaggacaaccagccagggttcctgcggcggattgtagttttccatccccatcttcggctccgttactgatgcgtcacaacgatcaaacgcagggcatccagacgccagcctgcctgatccaggctttccattacctgctgacggttgctctcaatggcggtcagttcgtcgtcacgaatgttcgggttaactgcacgcagcgcttccagacgagacagctcggcagacagtttttcgtcggcttcgttacgcgctgcatcaatcaatgcacgggcagatttctcgatctgcgcttcccccagctgaaggatagcgtgaacatcctgctgcacggcgttaaccagcttgctgccggtgtgacggttaaccgcgttaagctggcggttaaaggtttcaaactctacctgcgccgccaggttgttgccgtttttatccagcagcatacgtaccggcgtcggtggcaggaagcggttgagctgcaactgcttcggagcctgggcttcaaccacataaatcagttccaccaacagcgtacctaccggcaacgctttgtttttcaacagtgaaatcgtgctgctaccggtatcgccagaaaggatcagatccagaccgttgcggatcagcggatgctcccaggtaataaactgtgcatcttcacgcgccagcgccacttcacggtcgaaggtgatggtgatgccatcttccgacaggccagggaagtccggcaccagcatatgatcggacggcgtcagcacgatcatgttgtcgccgcgatcgtcctgattgataccgataatatcgaacaggttcatggcgaaggcgatcaggttggtatcgtcatcctgctcttcaatgctttctgccagtgcctgggctttttcgccaccgttggaatggatttccagcaggcggtcacgaccttgttccagctgtgctttcagcgcttcatgttgctcgcggcagtttttgatcagatcgtcaaagccttcggtctcatccggcgaggccagatagttaatcaaatcgttgtacacgctatcgtagatagtgcgtccggtcgggcaggtgtgctcgaatgcatccagaccttcgtgataccagcgcaccagcaccgactgagccgttttttccagataaggcacatggatctgaatatcgtgcgcctgaccgatacgatccagacgaccaatacgctgctccagcagatccgggttgaatggcaggtcaaacatcaccatgtggctggcgaactggaagttacgtccttcagaaccgatttccgagcacagcagtacctgtgcgccggtgtcttcttcggcaaaccaggcggcagcgcggtcacgttcgataatcgacatgccttcgtggaacactgcggcgcgaataccttcacgttcgcgcagtacctgctccagttgcagcgcagtggccgctttggcgcagatcaccagcactttctgagagcgatggctggtcaggtagcccatcagccactcaacgcgcggatcgaagttccaccaggtggcgttatcgccttcaaattcctgataaatacgctccgggtagagcatatcgcgagcgcgatcttccgcacttttacgtgcgcccataatgccggagactttaatagcggtctgatactgcgtcggcagtggcagcttaatagtatgcagctcgcgtttcgggaagcctttcacaccgttacgggtgttacggaacagcacgcggctggtaccgtggcgatccatcagcatcgaaaccagttcctgacgggcgctctgggcatcttcgctgtcgctgtttgctgcttgcaacagcggctcgatatcctgctcgccgatcatctcaccgagcatgttcagttcgtcattgctgagtttgttaccagccagcagcatggcaacggcgtccgcaaccggacgataatttttctgctcttcaacgaattgcgcaaaatcgtggaaacggttcgggtccagcagacgcagacgggcgaagtggctttccatccccagttgttccggggttgcggtcagcagcagaacgccgggcacgtgctctgccagttgttcaatggcctgatattcacggctcggcgcatcttcgctccacaccaggtgatgcgcttcatcgaccaccagtagatcccattcggcttcacagagatgttccagacgctgtttgctacgacgggcaaaatccagcgagcaaataaccagctgttcggtgtcgaacgggttgtaagcatcgtgctgagcttcggcataacgctcatcatcaaatagcgcaaagcgcaggttgaaacggcgcagcatttctaccagccactgatgctgtaaggtttccgggacgataatcagcacacgttcagcagcgccagagagcagttgctgatgcaggatcatcccggcttcaatggttttccctaaacccacttcgtcagccaacaggacgcgcggcgcgtggcggcgaccaacatcatgagcgatgttgagctgatgggggatcaggctggtacgctgaccgcgcaggccgctgtacggcatacggaactgttcgctggaatacttacgcgcgcgataacgcagcgcaaagcggtccatacggtcaatctgcccggcaaacagacggtcctgcggtttgctgaacaccagtttgctatcaaggaaaacttcacgcagggctacgccggactcttcagtatcaaggcgagtaccgatataggtcagcaagccattttcttcttttacttcttcgacttgcatctgccagccgtcatggctggtaatggtatcaccagggttgaacatcacgcgggtcacgggggaatcactgcgtgcgtacagacggttttcaccagtagatgggaaaagtaaagtgacagttcgcgcatccaccgcgacaacggttccaagtcccaattcgctttctgtatcgctgatccagcgttgaccaagtgtaaaaggcatatgtgttcggctctatatctttaattgcaggcaataaccacccgctaccgtgcttatgaggtagtggtgttattcaggtccaggaatggaaagggcgctatggtactggatggcaaagcattcgtcacgcatcaaaatggtatctggcgaactcttttttttgctcaaaatagcccaagttgcccggtcataagtgtagcaaaattatcctcaataaaagggagtattccctccgccacgggttgtagctggcgggtcagatagtgttcgtaatccagtggtgaacgttggtagtccagcggctccgggccgttggtggtccatacgtacttaatggtgccgcggttctgatattgcaaggggcgaccgcgcttatggttttcttcatcggcaaggcgagcggcgcgtacatgaggcggaacattacgctgatattcgctcagaggacggcgaaggcgtttacggtaaaccagctgcgtgtccagttcgcccgccatcagcttgtcgatggtttcgcgcacgtattcctgatatggctcgttgcggaagatacgcaggtacagctcctgctgaaactgctgggccagcggcgtccagtcggtgcgcacggtttccagccctttaaacaccatccgctgtttgtcgccctcctgaatcagtccggcgtagcgctttttgctgccggtatcggccccgcgaatggttggcatcagaaaacggcagaaatgggtttcatactccagttccagtgcgctggtcagccgttgtttttgcagcgtttccgcccaccaggcgttaacgtgctgcaccagtgcacgaccgattttcgctgcttcttcttccgaatgtgcacctttcagccagacaaacgttgagtcggtatcgccgtagataacatcatagccctgcgcttcaatcaacgttttggtttgccgcatgatctgatgaccacgcatggtgatcgacgatgccaggcgtggatcgaagaaacggcaggcggtggtgccgagcacaccataaaaggcattcataatgatcttcagcgcctgcgaaagcggcttattactctgacgtttggcttcatcgcgcccgtgccagatgttagtcacaatctccggcaggcaatgtttctcccgtgagaaccaggcatcgagaaaaccttcggtactgtgctctggatcaggctgcgccatgccttccaccagtccgacgggatcaatcagaaaggtgcggatgatcgacgggtacaggcttttgtagtccagcaccagcaccgaatcataaagcccaggtcgcgaatccatcacgtagccgccagggctggcgtgcggcggcacttcgccgagattaggcgcgacataaccagcgcgatgcatacggggaaaatagagatgaccaaacgctgccaccgaaccgccgtgtcgatctaccggcaggccgttcaccgtcgcccgttcgagcaaaaacggcatgatttcagttttgtggaagatctgcgtcaccagctcgcaatctttcaggttataagttgccagcgcaggcttatcttcggcgaaacggcggtcaatttcgtccattcgatcccacgggttatcgatagattttccttcgcctaataactcctgagcgacggtttccagcgagaatgaagagaaattccagaacgcggatttcagcgcctcgataccgtcgataatcagtcgccctttggcctgagcaaaaaagacgccgtttttaaagccgtgctcgcgccactccaactcgctgttatcacgccccagacgcagcggaatacggtaacgctcggcatgtttttgcagcattcgcagatcgaactgcaccacgttccaaccgatgatcacatcaggatcatgagtcgcaaaccaggcgttaagtttttccagtagcagcgggcggctggcgacgtattccagttcaaaatcgagcgcggaggcgtcgccattctctggccccagcatataaacgatacgctgcccgcaaccttccaggccgatgcagtacagctcaccgtggcgggtggtttcaatatcaatagaaacccacttgagcggcggacgatagtcgggatgctgtttcagacgggcattaacgatagcgccgttgcgcatatcaccctcgacccacactggcgaggtgataaaccgctccatcagatagcgttctggcgggcgcacatcggcctcgtagacggtaacgccagcttcacgcaggcgcttttcgtaattcatcaactggcgatgggcgcgacagtaaaggccatacaccggctggcgatgaaaatcctttaacgccagcggcgtcaggcgaaagccttgctcaccctgcaaaatatgctgggcgcggggaacctgatcggcgggaataaacgccacggactcttgcggcgcaagcgtaacctgcaacggcccgttgtccgtcgctaaccaaaaggaaacttcggttccttgcggggtgtcccgccagtgtcgggttaagataaaacctgcctgcgccacgctgaaaatccaataaaaaaccaggcttgattatagcctggtttcgtttgattggctgtggttttatacagtcattactgcccgtaatatgccttcgcgccatgcttacgcagatagtgtttatccagcagcgtttgctgcatatccggtaactgcggcgctaactgacggcagaatatccccatataagcgacttcttccagcacgatggcgttatgcaccgcatcttcggcgttttttccccatgcaaatgggccgtgagaatggaccagcacgccgggcatttgcgctgcattgataccctgtttttcgaaggtttctacgatgacgttaccggtttcccactcatattcaccgttgatttctgcgtcggtcattttgcgggtgcagggaatggtgccgtagaaatagtcggcgtgggtggtgccggctgctggaatcgactggcccgcctgcgcccagatggtggcgtggcgcgagtgtgtgtgcacaatgccgccaatagacgggaatgcctgatagagcagccggtgagttggcgtgtcggaggagggctttttcgtaccttcaaccacttcaccggtttcgatgctgaccacgaccatatcgtcagcggtcatgatgctgtagtcgacgccggaaggtttgatcaccaggacgccgcgcccgcgatcaacggcgctgacattgccccaggtgagcgtgaccaggttgtgttttggcagcgccaggttggcttctaatacctggcgtttgagatcttctaacatgttgactccttcgtgccggatgcgctttgcttatccggcctacaaaatcgcagcgtgtaggcctgataagacgcgtcggcgtcgcatcaggcggtgaatgccggatgcgctttgcttatccggcctacaaatccggaacgcgtaggcctgataagacgcgccagcgccgcatcaggcggtgaatgccggatgcgctttgcttatccggcctacaaatccggaacgcgtaggcctgataagacgcgtcagcgtcgcatcaggcgttacatacctgatgcggctacttagcgacgaaatccgtaatacacttcgttccagcgcagcgcgtctttaaacgctggaaggcgggtatcgttatcaatcactgtgatttcaatgtcgtgcatctcggcgaactggcgcatatcgttgaggttcagcgcatggctgaagacggtatggtgcgcgccaccggcaaggatccacgcttcggaagcgctcggcagatccggttgcgctttccacagcgcattcgccaccggcagtttcggcagggagtgcggtgttttcaccgtgtcgatgcagttaaccagcagacggtaacgatcgccgagatcaatcaggctggcgacaatggctggaccggtttgagtgttgaagatcaggcgggcaggatcgtctttaccgccaataccgagatgctgaacgtcgaggatcggtttctcttccacagcgatcgacggacagacttccagcatatgggagccgagtaccaggtcattacctttctcgaagtgataggtgtagtcctccataaaggaggtgccgccctgcagaccggttgacatcaccttcatgatgcgaagcagggcggcagttttccagtcgccttcgcccgcaaagccgtagccctgctgcatcagacgctgtacggccagacccggaagctgtttcaggccgtgcaaatcttcaaaggtagtagtgaaagcgtggaagccaccttgttccaggaaacgcttcatccccagctcaatacgcgccgcttccagcacgttctgtcgtttttcgccgtggatttgtgtggcaggtgtcatggtgtagcagctttcgtactcatcgaccagcgcgttaacatcgccgtcgcttatggagttcaccacctgcaccagatcgccaaccgcccaggtattgacggagaaaccaaacttgatctgtgcggcaactttatcgccatcggtgaccgctacttcacgcatgttatcgccaaaacggcagactttcagatgacgggtatcctgtttagagaccgcctgacgcatccaggagccaatacgctcatgtgcttgtttatcctgccagtgaccggtaacaacggcatgttgctgacgcatacgcgcgccgatgaagccgaactcgcgaccgccatgcgcggtctggttcaggttcataaagtccatgtcgatgctgtcccacggcagcgccgcgttgaactgggtgtggaattgcagcaacggtttgttgagcatggtcaggccgttgatccacattttggccggggagaaggtgtgcagccacaccaccagaccagcgcaacgatcgtcgtaattcgcgtcgcggcaaatagcggtgatttcatccggcgtggtgcccagcggtttcagcaccagtttgcagggcaacttcgcttctgtattcagtgcattaacaacgtgttccgcatgttgcgtcacctggcgcagagtctccgggccgtaaagatgctggctgccaatgacaaaccacacttcataattatcaaaaatcgtcattatcgtgtccttatagagtcggaacggcctggtcagcctgtgccggggcggaagttggaagatagtgttgttcggcgctcatcgcccattgctgatagcggcgataaagctgttcaaagcgttgtgcctgttcgttgcgcggttgcagggttttctctaccgcactggccattttttgctgggctgatgggatgtctgcgtgcactttcgcggcgacggcagcgaaaatcgccgcaccgagcgcgcaacattggtcagaagcaacaatttgcagcgggcgattcagcacgtcgcagcaggcctgcataatgacctggtttttgcgcgcgatgccgcccagtgccatcacgttattgacggcgatcccctgagcggtgaagcactccataattgcgcgtgcgccaaaggcggtggcggcaatcaaaccgccgaacagcagcggagcgtcggtagcgaggttcagatcggtaatcacccctttcaggcgttggttagcgttcggtgtgcggcggccgttaaaccagtcgagcaccaccggcaggtgatccagagacggatttttggcccatgcttcggtcagcgccggaagcagttgtttctggctggcgttgatttgctctttcagttccggatgctgggcggcaagctgttccagcggccagccgagtacgcgaccgaaccaggcgtagatatccccaaacgccgattggcctgcttccagaccgataaatccaggcaccacgctgccatcaacctgaccgcaaatacctttcactgcccgctcgccaacgctctgtttgtcggcaatcagaatgtcgcaggtggaagtaccgataacttttaccagtgcgttaggctgtgcgcctgcgccaactgcgcccatatggcagtcaaacgcgccgccggaaatcaccacgctttcaggcaggccgagacgctgcgcccattccgggcataaggtgcccaccggaatatcggcagtccaggtttcagtgaacagcggggaaggtaaatgacggttgaggatcgggtccagctcatcaaagaaactggctggcggcaggccaccccagctttcgtgccatagagatttatgcccggcgctgcaacgtccgcgacgaatatcctgcgggcgggtggtaccggaaagcagagctggcacccagtcgcacagctcaatccacgatgcggcagattgtgccacggcgttgtcctggcgagttatatgcaggatttttgcccagaaccattcgctggaataaataccgccaatatagcgggagtagtcaacgttgcccggcgcgtggcacaaacgggtaatctcttccgcttcttcaaccgcggtgtggtctttccacaatacgaacatcgcgttcgggttttcggcaaactccgggcgcagcgccaggacgttaccgtcggcgtcaatcggtgcgggcgtcgagccggttgtgtcaacgccaatcccgaccacagctgcgcgctgttcgacgctaagctctgcaagcacagttttcagcgccgcttccattgactcaatgtagtcacgcggatgatgacggaactggttattcggggcatcacaaaattgcccgttctgccaacggggataccactctacgctggtggcgatctcttcaccggtggcgcagtccaccgccaaagctcgcacagaatcactgccaaaatcgaggccaattgcaatcgccatcgtttcactccatccaaaaaaacgggtatggagaaacagtagagagttgcgaaaaaaagcgtcaggctggatccgctaatcttatggataaaaatgctatggcatagcaaagtgtgacgccgtgcaaataatcaatgtggacttttctgccgtgattatagacacttttgttacgcgtttttgtcatggctttggtcccgctttgttacagaatgcttttaataagcggggttaccggttgggttagcgagaagagccagtaaaagacgcagtgacggcaatgtctgatgcaatatggacaattggtttcttctctgaatggcgggagtatgaaaagtatggctgaagcgcaaaatgatcccctgctgccgggatactcgtttaacgcccatctggtggcgggtttaacgccgattgaggccaacggttatctcgatttttttatcgaccgaccgctgggaatgaaaggttatattctcaatctcaccattcgcggtcagggggtggtgaaaaatcagggacgagaatttgtctgccgaccgggtgatattttgctgttcccgcctggagagattcatcactacggtcgtcatccggaggctcacgaatggtatcaccagtgggtttactttcgtccgcgcgcctactggcatgaatggcttaactggccgtcgatatttgccaataccggtttctttcgcccggatgaagcgcaccagccgcatttcagcgacctgtttgggcaaatcattaatgccggacaaggggaagggcgctattcggaattgctggcgataaatctgcttgagcaattgttactgcggcgcatggaagcgattaacgagtcgctccatccaccgatggataatcgggtacgcgaggcttgtcagtacatcagcgatcacctggcagacagtaattttgatatcgccagcgtcgcacagcatgtctgcctgtcgccgtcgcgtctgtcgcatttgttccgccagcagttagggattagcgtattaagctggcgcgaggaccagcgcatcagtcaggcgaagctgcttttgagcaccacccggatgcctatcgccaccgtcggtcgcaatgtcggttttgacgatcaactctatttctcgcgagtatttaaaaaatgcaccggggcgagtccgagcgagtttagggcaggttgtgaataataagaaagaagggggggaacccccttgctttcttcatctgacgttatttatatatttcacgggggattaattttagttatttttagttgaatcgttttacctgaattattttttttcttgataaaatatcgacaacgatttctttttgtaaaaataaaacgaaggcttatgtatcgggatacccatcatgaacatattgtccggttgcatcaggagaatatatcaagcggtttgttcatcgtaggaacaccacattgagcggttatggcaggcacttcacgccaccataaatgccgttcgatgtggcagttgttgaaaaaagtacggcattctatgaaaaacgccagttactccctcagaggagaacatggtctggcaaaagtgtagcggcatcaggcgcagctatctttgtaaattcattcataaaatgaattgtatacaaaaaaatattgaaaaataatatttttccttattgatattatttgctatacgttttttttgaggggagattgtgatgagcaaacgtaacgatattactgatggaatatttgcaacaacgaaaaagtatggattagtttataccgaagagttaggttggatcgatttggggcatgctcagggacaagatgccagaatattaaaaagaaaattggagcaagaacatttttcaacatattacgatgaatttcatgattggtattttcctgttgattatcatcaggaaatgggaattcggaaaaaatattaggagtagatcttacatttcataccggtgtttatacgaaggttatggttcgttcatgtctttcacccactcttaaagcaagagttgccttaacgttaatgtatggaactgcgaagaggtttgaagcatggcaaaactcatttatttttaactggtatactgatagcggatttagtgcagaagatttagtctcagacttgattggtttttatcgtgtatttggaacaggccccgatccacttttattggcaaaacctttatcttacacaaaagccttacaaatatgggatacatatggagcgccagggaattttaaaaatactgagtttacgccattcttatttacaacccatcctccttttaaaaaaaatcaactaataaaaaagaagcttccagaatggttaaattatataaagccattagatgagtctttttcaacattgttatataatcaatataataatagacctgttactaattattataaagataaaaacagaataaatcatgagttgtatagttcattatcaagttcgggagctataaagttttcagaatctccctttgaaagaccgctttttcttttcttaaaccctcattatccgcacaggtcgtgagtagagatgtcaaaatatatttatattttattatcatttttagttttattctttatatttttctatgcttatatctcattgatgtcaaaggaacatcactatacacagcatgaactttccccatttttcctttatacgccagagagtttgcgaaatttgccaaacatatcaaacgtagccgagtatagctattactataatgttgatgatatgcaaacaagagtgattgttacatggcgaaatatagataacatttttcttcagaaagcaaagctaatagattttttgaaaagaatgggaccgagtctacaaaacgattgtatatggttttttcatgataaaagtgattatgcaaataatttccagcgttattgcgtcattgagcaccgtgattctctgcaggtggaatattttgagactatcgaatgataggcagagggtgtcttttgtgccggttgtgaagaaaaagtgaatgatgtagccgtcaagttgtcataattggtaacgaatcagataattgacggcttgacggagtagcatagggtttgcagaatccctgcttcgtccatttgacaggcacattatgcaagcattgctggaacactttattacccaatctaccgtgtattcattgatggcggtgttattggtggcctttctggagtcgctggcgctggtcggtttgattctacccggtacggtgctgatggcggggctgggagcactgattggcagcggcgagttaagtttctggcacgcctggctggcagggatcgtcggttgcctgctgggcgactggatctccttctggctgggctggcgttttaaaaagccgttgcatcgctggtcatttctgaagaagaacaaagcattactcgataaaaccgaacatgcgctgcatcagcacagcatgttcaccattctggtcggtcgttttgtcggcccgacgcgtccgctggtgccaatggtggcgggaatgctggatctcccggtggcaaaatttattacgccgaatattatcggctgcttgctgtggccaccgttttacttcctgccggggattctggcgggtgcggcgatcgatattcctgccgggatgcagagcggtgagtttaaatggttgctgctggcaacagcggtgtttttgtgggttggaggctggctgtgctggcggttatggcgcagcggtaaagcgactgaccgtttgagtcattatttgtcccgcggtcgtttgttgtggctgacgccgttgatttctgccatcggcgtggtggcgctggtggtgttaattcgccacccgttgatgccggtgtatatcgatattttgcgtaaagtggttggggtttagaggatagccttgtgcgggttgcctgatgcgacgcttgccgcgtcttatcaggcctacaaaacgcactacctgtaggtcggataaggcgttcacgccgcatccgacagtgcatattaacctttaattcccaacagcgccgaagcactcgccttaccgctcaacaactcatcggtcttaccctgccaggcgatacgcccgtcggcgaccaccaccgagcgcgtggcgatccgcgccgcatcttccacactgtgcgacaccatcaatagcgtcattttttgctgttggcagctcgtgctcaccagcgtcagcatctcctgacgtagcgccggatcgagcgcggaaaacggttcatcgagcaataaaatgggctgttcgcgtaccagacaacgcgctaacgccacgcgctgtcgttgaccgccggaaagctcgccaggtaaccgcgccattaaattatcaatccccatctggtgggcaatcgcgtgcattttcttctgctgcgccgcatttagtttcaaccccggatttagccccagcccgatgttctgcgcgaccgtcaggtggctgaacaggttgttctcctgaaacagcatcgacaccggacggcgtgacggcggcgtcgtggtgtgatctacgtcgtcgatagtcagcaaaccgctggctggcgtcagaaaaccggcgatcaaattaagcagggtacttttacccgcgccgcttggcccgaggatcgccacctgctcgccgcgttccaccgttaagctaaaacgcatcggcaaatgctggtaaagccaggtgatatcagtcagttttaacatttcgccccggtattttttcaatcacggtaaacagcagaaaacagagcagcagcagaattaacgcggtgaccgcgccgtcctggctgcgataggagccaatttgctggtagagataaaacggcagggtacggaaatcatcgttaccgaacaatgccaccacgccaaaatcaccaatcgacagcacacaagcaaaggccagcgcctgcgccagtggacgtttcagggcgcgcagctccaccacttttaagcgtgaccagccttcaatgcccagcgactgacacaacatgctgtagcgggcggtgatatcgcgcatcgggttttccagtactttcagcgcataagggattgccattaacgcattggtgaaaatcacaatgccgtcagcagattgcggcaggccgatagtgttgttgagcagtaaaaagaagcccgtagccagcacaatccccggcatggcgaggatcaacatgccgctcatctccagcgcctgacccgccagcattttctgccgcgcccgaagttcgcgactgctccatagcagcatcatggtcagcactacgcacaatacgcctgccgccagcgcaatacgcaacgaggtccacagcgcctgccacagcaccggttgtgccagcacttccggcaactggcgatttaccccatcgacgatcaccgccagtaacggtggcagcaacagcagcagcgccagcacaattaacgccgtgtcgcaaatgcgactatgcagacgatcgtccgggtcgcgccagccttgcagcagtgtggtaccaggcgcaatggccttactcaatcgctgactcaacagcaccagcccgaggcagcacaccatctggatcagcgccagcattgccgcgcgggcaggatcgtagtcgtaactcagtgcctgatagattgccagctcgatagtggtcgcctgcggaccgccgcccagcgatagcacggtggcgaagctggcgaaacagagcataaagattagtgcggcaaccggcgggatttgtcgccgtaaccacggccattcgacgaaacggaaaaaatgccagccgcgcatcccaagttgggcggcaagctgacgttgttcgccgggaatgttttccagtgcctggagtaataaacggctagccatcggcagattaaaaaacacatgggccagcaaaatgccttgcaggccgtagggcgaaaaggtccactccagaccaagtgattgccagagcgaggccagccagccctggcgaccatagacgctaagaatgccgaaaacagcaaccagcaccgggaggatcaaggtcattgcgcacagacgcaacagcatctgtcgcccaggaaagcgcctgcgatagagggcgcgggcgaggaatattgcgggtacgacagagagctgcgccgagagaaacgcctgccagaaggagaagcgcaccacatgccacaggtagctgtcctgccagactgccacccagtcaccctgcggcgcgttccaccacagggcgagaaacgccgccagtgcaaccgctaccaccagcgtggcggcgcttacgcctggaattaaccagccgggaattaacggctgacggcgcgttgccattcgctaatccatgcctgacgttgtgccgccacttcggcgggtgtgaactctagcgtggtggctggtttggtcaattgttcaaatcctgcaggcagagtgacgtttgctaccggatacatccagttgccggttgggatcgcattctgaaaagccggagaaaccataaactggaggaatttttgcgccagctctggctgcttgctggcagcggtgcgggcggcaacttccacctgcagatagtgaccttcgctaaagtttgtggcggcgtagttatctttcttctcttcgagaatgtgataagccggagaggtggtgtaactcagtaccagatcgctttcgccttttaaaaacaggccgtaggcttcgctccagcctttggtgaccgtgacagttttcttcgccagtttctgccaggcttgcggggcgttatcgccatagactttttgcatccatagcaacagacccagccccggcgtactggtacgtggatcttcataaatcacccgccagttctgatcgctctcaaccagttctttcaggctttgcggcggatttttcagtttgttcttgtcatagacgaaggcgaaatagccgtaatcaaacggtacgaaagtgtcattattccagccgccaggaacgttaacggcttccgctgccacaccgcttttagcaaacagccctgttttgctggcggcgtctaacagattgttatccagccccagcaccacatcggctttgctgtttttgccttccatccgtagacggttgagcagcgaaacgccatcttccagcgccaccagtttcagttcgcaattacagtctgcttcaaaggcttttttgactaccggaccaggtccccagtcagcggcaaaggaatcgtaggtataaacagtcagaacaggtttagcgaaaacaggcgctgtgcacagcaacagcaggggaagacatttttttaacactttgcacctcacaaaagagtggcaaaggacttgagaaggagcctcaaatcccttcgccggcgttatccggatcaggttcgacgggtattttctcagcgcacgcggctgcgtggcaccccgttgagaacggcgttagtgtagtgattttgttatcaaccagcaatcatggatccggtggtgcaaaccacgctgatttaaaatcgaaccagccgagggtgttcatgcgcaggccgcgcatactacgttgcccctgaatgatcagccagtggtggataagtggcaccattgctttgctggcgaccagttgctggcaccagttcgccaggttcatttcgccattgcgccagcgggcggcgtcggcttgccagtcgatcggaatacagtgttggagcagcggcacctcgcacaagtgcgcgaacagcgaaaaatccagcggcagcgtaaagttggcgctgttaagccagatatcgctctcgatctctccttcatgccactgatcgtagctgatctctttgatttccagcgtgacctggtgacttgccagaatctgctgcatgatcccggcaatcacccgatgctcgctgtgatcctgataaaaggtcagggtgaggctttccagaccagccggtttttcgctctttatggtgcgggcatggtgccaacgggggagcagtccataagccgggaaccacagttgctggtactgttcctcagcgaaatagaccagattcgtcggagaaagcacatagcttacccagtctctgacttgctgattcgcccctcgatgggtgcggctgtcgaacagtaaatagtagcaaccttcctccaggcggctttcaatctctttttcctcgccctgtggaccttttagcatcagccctccggctggctcgtcggcaatttccggcagaacccagacgttaacttcgtcgattaatgcccggtaaccgaagaagtcatcgaatgcctgaattttcagttgattggtgctgttgcggatcaccgcatacggaccggtgccgatgggatggctggcaaagttactgagggtttcccattcgcgcggcaggatcattgccggaacttgccccagcagtaacggcaaccagcggtccggttgcgtgagatggatatccagcgtccagggcgtcggcgacacaatgttagcaatatgcgaatagagcggaagcgtattgattcgttttaaagaggcgatcacatcgtccatttccagttcacgaccatggtgaaaatggactcctggacgcaaaaagaaacgccagtgaagcggtgatatttgctgccagtggtgtgcgatgtctgcttccagttccccattttcctcatttatgcgcgttagcgaactgaagatttgccgggcgatatgggtttcagaacggcgcaatgcgctgccaggtagcagattacgcaacggacgatagtagagcacgcgcaggatgtgccgcccctggcggaagctgcggcccagatgagaaaccagcatttgccgcacagtcgctttgtcgccaaccaactgcactagttggtcgatacgatcctgctccagcaggtcttccgcccgctgttgctgaagcgccagcccggtatagaggaatgtcaggcgtgaacgtttaccgcgcccgacttccgcttcccacgtcagccagccgcgatcctgcatggtgttgagcagggtgcgcatatgacgacgcgagcaactcagtaacgctgccagttcgttgagcgtggtctcctgagatttaccctcgcagcattgccacaggcggatgaactgttgttgcagacgagcagatggcataaaaggggaactcctgcgcaaaagacagcaattttattttccctatattaagtcaataattcctaacgatgaagcaaggaggtgccccatgcgtcagttttatcagcactattttaccgcgacagcgaagttgtgctggttgcgttggttaagcgtcccacaacgattaaccatgcttgaagagctgatgcagtgggaggggagtcattctgactactgatttgcggacatcatgtgtgactgagtattggtgttaatcgccacgccagcagtgattatctgctggcttttttctttttggcgattgagtgccggacggtgtacaaactaacgcataaacgccggttgcttctcttcataagacgcaatagcatcgtcgtgctgcagagtcaggccgatgctgtccagaccgttcatcatgcagtggcggcggaaggcatcgatggtaaagcgataagttttctctcccgctttcacctcttgcgcttccaggtctacatcaaaatgaatccccggattggctttcaccagcgcaaacagctcatccacttctgcatcgcttaatttcaccggcagcagctggttgttaaagctattgccgtagaagatgtcagcaaaactcggcgcaatcaccaccttaaaaccgtaatcggtcaatgcccacggcgcgtgctcacgcgaggaaccgcagccgaagttttctcgtgccagcaaaatggaagcgccctgatactgcgggaagttcagcacgaagtccgggtttggctgttggcctttttcatccagaaaacgccagtcgttaaacagatgcgcgccaaaacccgtacgggtcactttctgcaaaaactgtttcgggatgattgcatcggtatcgacattggcggcatccaacggaaccaccaggcctgtgtgtttgataaatttctctgccatggtgtgctccttatttaatgttgcgaatgtcggcgaaatgtccggtcacagccgcggcggcagccattgccggactgaccagatgcgtgcgcccgccgcgcccctggcggccttcaaagttacggttgctggtggaggcgcaacgttcgcccggattcaggcggtcgttgttcatcgccaggcacattgaacaacctggcaagcgccattcaaaaccagcttcgataaaaattttgtccagaccttccgcttccgcctgggctttaaccggaccggagccgggaaccaccagcgcttgtacgcctggcgcgactttccggcctttggcgatttccgctgccgcgcgtaaatcttcaatacgcgagttagtacaggaaccaataaacactttgtcgatagccacttctgtcagcggaatacccggtttcagccccatataggccagcgctttttctgccgacgcgcgttcaaccggatcggcaaacgaagccggatcgggaatattgtcgttcacagaaatcacctggcctggattggtgccccaggtgacctgcggcgaaatctcttctgcttgcagagtgacaacggtatcgaaagttgctccttcgtcggtttgcagggttttccagtaggcaacggcgtcgtcgaaatctttgcctttcggcgcatgcagacggcctttaacatagttaaaggtggtttcgtccggtgcaaccagaccggcttttgcgcccatttcgattgccatattgcacagggtcatacgaccttccatgcttaaatcacggattgcttcgccgcaaaattccaccacatgcccggtaccgcctgcgctgccggttttaccaataattgccagcacgatatcttttgcggtaatgcccggcgcggctttgccctggacttcaattttcatggtcttcgcccggccctgtttcagggtttgcgttgccagtacgtgttcaacttcggaagtgccgataccaaaggccagtgcgccaaacgcgccgtgggtggcggtatgtgagtcgccgcagacaatggtcatccccggcaaggtcacgccctgttccggccccattacgtggacgatcccctgatacgggtgattcaggtcatacagctcgacgccaaattctttgcagtttttgatcagctcctgcatctggatgcgcgccatttcaccgcaggcattaatgtctttcgtctgggtagagacgttgtgatccatggtggcgaaggttttgcccggctgacgtaccgggcgaccgtgggcgcgcagaccatcgaacgcctgcggtgaggtcacttcatgcaccaggtggcggtcgatatataacagcggggtttcgttttcggcttcgtacactacgtgagcgtcgaataatttttcgtataacgtcttagccatgattacaccccttctgccacatagcgggcaatgatatcgcccatttcatcggtactaacggcggcagcgccacgggctaaatccccagtgcgaatgccttcttctaatgcgcggttaatggcgcgttcaatggcggaagccgcatcatcggcatccaggctgtaacgcagcagcagcgccagcgacagaatttgtgcaatcgggttggcgatatttttacctgcgatatcgggtgccgagccgcccgccggttcatacagaccaaaaccttgctcgttcaggctggcggaaggcaacatccccattgagccagtgatcattgcgcactcatcagacagaatgtcgccaaacaggttggagcacagcaagacgtcaaactgtgatggatctttaatcagctgcatggtggcgttgtcgatgtacatatgcgtcagttcgacgtccgggtattccgtggcgatctcgttaacgatctcccgccataaaatagaggattgcagcacgttggctttgtcgattgaggtgactttgtggcgacgcttgcgggcagattcaaatgcgatgcgggcaatacgctcgatctcaaaacggtggtacacctcggtatcaaacgctttttcatattgtccgctaccttcgcggccttttggctgaccgaaatagatgccgccggtcagttcgcgcacacacaggatgtcaaagccgtttgcggcaatgtcagcacgcagtgggcagaacgcttccagcccctgatacagttttgccggacgcagattgctgaataatttgaagtgtttacgcaaaggcagcagtgcgccgcgttctggttgctggtctggcggcaaatgttcccacttcggaccacctaccgagccaaacagcacggcatcggcttgctcacaaccttcaaccgtcgcaggcggcagcggctgtccgtggttatcaatggctgcgccgcctacatcgtaatggctggtggtgatacgcatcgcaaatcggttgcgcacggcatccagcactttcagcgcctgggtcatcacttccggaccaataccgtcccccggcaatacggcaatatggtaattcttcgacatcacacggtttccttgttgttttcgttgtgttgagctttgcgttgcaactctttttcgacttctgcggcacgccagatattgttcagtacgtgcaccatggctttggcggaggactcgacaatatcggtggccaggccgacgccgtggaagcggcgaccgttgtagttggcgacaatatccacctgacccagcgcatctttaccgtggcctttggcggtcaggctgtatttcaccagttcgacgttatagtcagtgatgcggtttatcgcctggtagacggcatcgaccggaccgttaccgttggcggcttctgctttgacttcttcgccacaggccagtttgacggcggcagtggcaatatcgttagaacctgactgcacgctgaagtaatccagacggaaatgctccggctcttcttgctgcttaccgatgaaggccagcgcctccagatcgtaatcaaacacctggccttttttgtccgccagcttcaggaaagcgtcgtacaggttgtctaaattatattcactttctttatatcccatctcatccatgcgatgtttcaccgccgcacgccccgaacgagaggtcagattcagctggatttggttcagaccaatagattctggtgtcatgatttcgtagttttcgcggtttttcagtacaccatcctggtggataccggaggagtgtgcgaatgcgccgctgccaacaatggctttgtttgccgggatcggcatattacaaatctggctaactaactggctggtgcgccatatctcctggtgattgatggcggtgtggacgttgagaatatccttacgaactttgatcgccatgatgacttcttcaagggaacagttaccggcacgctcgccgatcccgttcattgcgccttctacctgccgtgctccggcatgtaccgccgccagtgagttgccgaccgccaggcccaaatcgtcgtgggtatgtacggaaataatggctttgtcgatgttgggtacgcgttcatacaggccgctgatgattccggcgaactcaaatggcatggtgtagcccacggtgtccggaatgttgatggtggtggcaccggcattaatcgccgcttcgaccactcgcgccagatcggcaattggggtgcgtccggcatcttcgcaagaaaattcaacatcatcggtgtaattacgggcgcgtttcaccatatagatagcgcgttcgatcacttcgtccagcgtgctgcgcagcttggtggcgatgtgcattggcgaagtggcaataaaggtatgaatacggaaggcttcggcgactttcagggattcggctgccacgtcaatatctttttccacgcagcgagctaacgcgcatacacggctgtttttaacctggcgagcgatggtctgcactgattcaaaatcacccggcgaagagacggggaaaccgacttccataacgtcaacacccatacgctcaagggccagcgcaatttgcagtttttctttcacactcaagcttgcctgtaacgcctgttcaccgtcgcgcaatgtggtatcgaaaataatgacttgctggctcatggtttgggtccttgtctcttttgagcgcctcgcttcgggcataaaaaaacccgcgcaatggcgcgggtttttgtttgactgcgtgctggcttaatgctggatgccgctcactcgtctaccgcgcaaagaagatgcgtttagtagtagtagaccgataaagcgaacgatgtgagtcattaaatcagctccagatgaatgcgatatgcttttagagttactggatacaaaaacggatgtcaaccctgaagcaataaaaacgtcacgccattgtgagttcggcatccgtaaaattagctaattgtgctgcggtggttaaaacaagcgatattaatttctgcttaaccgccgatgcttttcatcggttgacatatttcagaataattttttgcatctaatcaacgagggaaagggggataaaatgcacgcgttacaaaacctatcctgatgatttgtattgaattatatgttttgcgaattttttgatattcatttgctgaatattattgatcaattaatgttaagaattaatgcattaaacatataaattaattattaaaaaacacatttaatccattttgtggatgattgagtattcgtggtagttatgattagattgttttcgcaacaaaaacattatggattattatgctgtagtaaatgactctttgctcggcagtggattctgtttttatcagaacctgtatctttatgttttcctaattttactcattttgctttttcttattttatatgcatgataaatcatattctcgaggattatttctctgcattccaataagggaaagggagttaagtgtgacagtggagttaagtatgccagaggtacaaacagatcatccagagacggcggagttaagcaagccacagctacgcatggtcgatctcaacttattaaccgttttcgatgccgtgatgcaggagcaaaacatcacccgtgccgctcatgctctgggaatgtcgcaacctgcggtcagtaacgctgttgcacgcctgaaggtgatgtttaatgacgagctttttgttcgttatggccgtggtattcaaccgactgctcgcgcatttcaactttttggctcagttcgtcaggcattgcaactagtacaaaatgaattgcctggttcaggttttgaacccgcgagcagtgaacgtgtatttcatctttgtgtttgcagcccgttagacagcattctgacctcgcagatttataatcacattgagcagattgcgccaaatatacatgttatgttcaagtcttcattaaatcagaacactgaacatcagctgcgttatcaggaaacggagtttgtgattagttatgaagacttccatcgccctgaatttaccagtgtgccattatttaaagatgaaatggtgttggtagccagcaaaaatcatccaacaattaaaggcccgttactgaagcatgatgtttataacgaacaacacgctgcggtttcgctcgatcgtttcgcatcatttagtcaaacctggtatgacacggtagataagcaagccagtatcgcgtatcagggcatggcaatgatgagcgtacttagcgtggtgtcgcaaacgcatctggtcgctattgcgccgcgttggttggctgaagagttcgctgaatccttagagttacaggtattaccgctgccgttaaaacaaaacagcagaacctgttatctctcctggcatgaagctgccgggcgcgataaaggccatcagtggatggaagagcaattagtctcaatttgcaaacgctaactgaatgcagaataggtcagacatcaatgtctggtttattctgcattttttattgaatgtagaattttattctgaatgtttgtgctctctattttaggattaattaaaaaaatagagaaattgctgtaagttgtaggattcagccgatttattatcaatttcatcctctgtaatggaggattttatcgtttcttttcacctttcctcctgtttattcttattaccccgtgtttatgtctctgtctgccaattgcttaagcaagatcggacggttaatgtgttttacacattttttccgtcaaacagtgaggcaggccatggagatgttgtctggagccgagatggtcgtccgatcgcttatcgatcagggcgttaaacaagtattcggttatcctggaggcgcggtccttgatatttacgatgcattgcataccgtgggtggtatcgatcatgttttagttcgccatgagcaggcggcggtgcatatggccgatggtctggcgcgcgcgaccggggaagtcggcgtcgtgctggtaacgtcgggtccaggggcgaccaatgcaattactggcattgccaccgcttatatggattccattccattagttgtcctttccgggcaggtagcgacctcgttgataggttatgatgcctttcaggagtgcgacatggtggggatttctcgcccggtggttaaacacagttttctggttaagcaaacggaagacattccgcaggtgctgaaaaaggctttctggctagcggcaagtggtcgtcctggacccgtggtcgttgatttaccgaaagatatcctaaatccggcgaacaaattaccctatgtctggccggagtcggtcagtatgcgttcttacaatcccacgacctccgggcataaagggcaaattaagcgcgctctgcaaacgctggtggcggcaaaaaaaccggttgtctacgtaggcggtggggcaatcacggcgggctgccatctgcagttgaaagaagcggtggaggtgttgaatctgcccgttgtttcctctttgatggggctgggggcgtttccggcaacgcatcgccaggcactgggcatgttgggaatgcacggtacctacgaagccaatatgacgatgcataacgcggatgtgattttcgccgtcggggtacgttttgatgaccgaacgacgaacaatctggcaaagtactgcccaaatgccactgttctgcatatcgatattgatccaacctcaatttctaaaaccgtgactgctgatatcccgattgtgggggatgctcgccaggtcctcgaacaaatgcttgaactcctgtcgcaagaatccgcccatcaaccgctggatgagatccgcgactggtggcagcagattgaacagtggcgcgctcgtcagtgcctgaaatatgacactcacagtgaaaagattaaaccgcaggcggtgatcgagactctttggcggttgactaatggggacgcttacgtgacgtccgatgtcgggcagcaccagatgtttgctgcgctttattatccattcgacaaaccgcgtcgctggatcaactctggcggcctcggcacgatgggttttggtttacctgcggcactgggcgtcaaaatggcgttgccagaagaaaccgtggtttgcgtcactggtgacggcagtattcagatgaacatccaggaactgtctaccgcgttgcaatatgagttgcccgtactggtggtgaatctcaataaccgctatctggggatggtgaagcagtggcaggacatgatctattccggccgtcattcacaatcttatatgcagtccttaccagacttcgtccgtctggcggaagcctatggtcacgtcgggatccagatctctcatccgcaagaactggaaagcaaacttagcgaggcgctggaacaggtgcgcaataatcgtctggtgtttgttgatgttaccgtcgatggcagtgagcacgtctacccgatgcagattcgcgggggcggaatggatgaaatgtggttaagcaaaacggagagaacctgattatgcgccggatattatcagtcttactcgaaaatgaatcaggcgcgttatcccgcgtgattggccttttttcccagcgtggctacaacattgaaagcctgaccgttgcgccaaccgacgatccgacattatcgcgtatgaccattcagaccgtgggcgatgaaaaagtgcttgagcaaatcgaaaagcaattacacaagctggtcgatgtcttgcgcgtgagcgagttggggcagggcgcgcacgttgagcgggaaatcatgctggtgaaaattcaggccagcggttacgggcgtgacgaagtgaaacgtaatacggaaatattccgtgggcaaattatcgatgtcacaccctcgctttataccgttcaattagcaggcaccagcgataagcttgatgcatttttagcatcgattcgcgatgtggcgaaaattgtggaagttgctcgctctggtgtggtcggactttcacgcggcgataaaataatgcgttgagaatgatctcaatgcgcaatttgcagcccaacatgtcacgttgggctttttttgcgaaatcagtgggaacctggaataaaagcagttgccgcagttaattttctgcgcttagatgttaatgaatttaacccataccagtacaatggctatggtttttacattttacgcaaggggcaattgtgaaactggatgaaatcgctcggctggcgggagtgtcgcggaccactgcaagctatgttattaacggcaaagcgaagcaataccgtgtgagcgacaaaaccgttgaaaaagtcatggcagtagtgcgtgagcacaattatcacccgaacgccgtggcagctgggcttcgtgctggacgcacacgttctattggtcttgtgatccccgatctggagaacaccagctatacccgcatcgctaactatcttgaacgccaggcgcggcaacggggttatcaactgctgattgcctgctcggaagatcagcccgacaacgaaatgcgctgcattgagcaccttttacagcgtcaggttgatgccattattgtttcgacgtcgttgccacctgagcatcctttttatcaacgctgggctaacgacccgttcccgattgtcgcgctggaccgcgccctcgatcgtgaacacttcaccagcgtggttggtgccgatcaggatgatgccgaaatgctggcggaagagttacgtaagtttcccgccgagacggtgctttatcttggcgcgctgccggagctttctgtcagcttcctgcgtgaacaaggcttccgtactgcctggaaagatgatccgcgcgaagtgcatttcctttatgccaacagctatgagcgggaggcagctgcccagttattcgaaaaatggctggaaacgcatccgatgccgcaggcgctgttcacaacgtcgtttgcgttgttgcaaggggtgatggatgtcacgctacgtcgcgacggcaaactgccttctgacctggcaattgccacctttggcgataacgaactgctcgacttcttacagtgcccggtgctggcagtggctcaacgtcaccgcgatgtcgcagaacgtgtgctggagattgtcctggcgagcctggacgaaccgcgtaagccaaaacctggtttaacgcgcattaaacgtaatctctatcgccgcggcgtgctcagccgtagctaagccgcgaacaaaagtacgcgccaggtgaatttctctctggcgcgttgagtacgggaatggacatcaatatccttaaagtaaataagactattcctggctattattgataaatgcttttaaacccgcccgttaattaactcacctgctgaaattcacaataattaaatgatattgacagcgcgtttttgcattattttgttacatgcagagatgaattgccgatttaacaaacacttttctttgtttttgcgcaaacctgctggcatcaagcgccacacagacgcaacagggactgttaaccagagaagatatgtcctaaaatgccgctcgcgtcgcaaactgacactttatatttgctgtggaaaatagtgagtcattttaaaacggtgatgacgatgagggattttttcttacagctattcataacgttaatttgcttcgcacgttggacgtaaaataaacaacgctgatattagccgtaaacatcgggttttttacctcggtatgccttgtgactggcttgacaagcttttcctccgctccgtaaactcctttcagtgggaaattgtggggcaaagtgggaataaggggtgaggctggcatgttccggggagcaacgttagtcaatctcgacagcaaagggcgcttatcagtgcctacccgttatcgggaacagctgcttgagaacgctgccggtcaaatggtttgcaccattgacattcatcacccgtgcctgctgctttaccccctgcctgaatgggaaattatcgagcaaaaattatcgcgtctgtcgagcatgaacccggttgagcgccgtgtgcagcgcctactgttaggtcatgccagcgaatgtcagatggatggcgcaggtcgattgttaatcgcgccagtactgcggcaacatgccgggctgacaaaagaagtgatgctggttggacagttcaacaagtttgagctgtgggatgaaacaacctggcatcaacaggtcaaggaagatatcgacgcagagcagttggctaccggagacttatcggagcgactgcaggacttgtctctataaaatgatggaaaactataaacattttacggtgctgctggatgaagccgttaatggcctcaatatccgtcctgatggcatctacattgatgggacttttggtcgcggtggtcactcacgtctgatcctctcgcagcttggcgaagaggggcgtttgctggcgatcgatcgcgacccgcaggctatcgccgttgcgaagactattgatgatccgcgcttctccatcatccacggacctttctccgcgctgggcgaatacgttgccgaccgcgatcttatcggcaagatcgacggcattctcctcgatcttggcgtctcttcaccgcaacttgatgatgctgagcgcggcttttcctttatgcgcgatggtccgctggacatgcgtatggacccaacccgtgggcagtcagccgctgaatggctacaaaccgcagaagaagccgatatcgcctgggtattgaaaacctatggtgaagagcgttttgccaaacgcattgcccgcgccattgtcgagcataaccgcgaacagccgatgacccgcaccaaagaactggcggaagtcgtggctgccgcaacgccggtgaaagataagtttaaacatcccgcgacccgtaccttccaggcggtgcgcatttgggtaaacagtgaactggaggagatagagcaggcgctaaaaagctcgctccatgtgctggccccgggtgggcggctttcgatcatcagcttccactcacttgaagaccgcattgtgaaacgttttatgcgtgaaaacagccgcggtccgcaagttccggcagggttaccgatgacagaagagcagctcaaaaaactgggggggcgtcagttgcgagcactaggtaagttgatgccgggcgaagaagaggtggctgagaaccctcgtgcccgtagttcagttctgcgtattgcagagaggacgaacgcatgatcagcagagtgacagaagctctaagcaaagttaaaggatcgatgggaagccacgagcgccatgccttgcctggcgttatcggtgacgatcttttgcgatttgggaagctgccactctgcctgttcatttgcattattttgacggcggtgaccgtggtaaccacggcgcaccatacccgtttactgaccgctcagcgcgaacaactggtgctggagcgagatgctttagacattgaatggcgcaacctgatccttgaagagaatgcgctcggcgaccatagccgggtggaaagaatagccacggaaaagctgcaaatgcagcatgttgatccgtcacaagaaaatatcgtagtgcaaaaataaggataaacgcgacgcatgaaagcagcggcgaaaacgcagaaaccaaaacgtcaggaagaacatgccaactttatcagttggcgttttgcgttgttatgcggctgtattctcctggcgctggcttttctgctcggacgcgtagcgtggttacaagttatctccccggatatgctggtgaaagagggcgacatgcgttctcttcgcgttcagcaagtttccacctcccgcggcatgattactgaccgttctggtcgcccgttagcggtgagcgtgccggttaaagcgatttgggctgacccgaaagaagtgcatgacgctggcggtatcagcgtcggtgatcgctggaaggcgctggctaacgcactcaacattccgctggatcagctttcagcccgcattaacgccaacccgaaagggcgctttatttatctggcgcgtcaggtaaaccctgacatggcagagtacatcaaaaaactgaaactgccggggattcatctgcgtgaagaatctcgccgttattatccatccggcgaagtgaccgctcacctcatcggctttactaacgtcgatagccaagggattgagggcgtcgagaagagtttcgataaatggcttaccgggcagccgggtgagcgcattgtgcgtaaagaccgctatggtcgcgtaattgaagatatttcttctactgacagccaggcagcgcacaacctgacgctgagtattgatgaacgcctgcaggcgctggtttatcgcgaactgaacaacgcggtagcctttaacaaggctgaatctggtagcgccgtgctggtggatgtcaacaccggtgaagtgctggcgatggctaacagcccgtcatacaacccaaataatctgagcggcacgccgaaagaagcgatgcgtaaccgtaccatcaccgacgtgtttgaaccgggctcaacggttaaaccgatggtggtgatgaccgcgttgcaacgtggcgtggtgcgggaaaactcggtactcaataccgttccttatcgaattaacggtcacgaaatcaaagacgtggcgcgctacagcgaattaaccctgaccggggtattacagaagtcgagtaacgtcggtgtttccaaactggcgttagcgatgccgtcctcagcgttagtagatacttactcacgttttggactgggaaaagcgaccaatttggggttggtcggagaacgcagtggcttatatcctcaaaaacaacggtggtctgacatagagagggccaccttctctttcggctacgggctaatggtaacaccgttacagttagcgcgagtctacgcaactatcggcagctacggcatttatcgcccactgtcgattaccaaagttgaccccccggttcccggtgaacgtgtcttcccggaatccattgttcgcaccgtggtgcatatgatggaaagcgtggcgctaccgggcggcggcggcgtgaaggcggcgattaaaggctatcgtatcgccattaaaaccggtaccgcgaaaaaggtcgggccggacggtcgctacatcaataaatatattgcttataccgcaggcgttgcgcctgcgagtcagccgcgcttcgcgctggttgttgttatcaacgatccgcaggcgggtaaatactacggcggcgccgtttccgcgccggtctttggtgccatcatgggcggcgtattgcgtaccatgaacatcgagccggatgcgctgacaacgggcgataaaaatgaatttgtgattaatcaaggcgagggtacaggtggcagatcgtaatttgcgcgaccttcttgctccgtgggtgccagacgcaccttcgcgagcactgcgagagatgacactcgacagccgtgtggctgcggcgggcgatctctttgtagctgtagtaggtcatcaggcggacgggcgtcgatatatcccgcaggcgatagcgcaaggtgtggctgccattattgcagaggcgaaagatgaggcgaccgacggtgaaatccgtgaaatgcacggcgtaccggtcatctatctcagccagctcaacgagcgtttatctgcactggcgggccgcttttaccatgaaccctctgacaatttacgtctcgtgggcgtaacgggcaccaacggcaaaaccacgactacccagctgttggcgcagtggagccaactgcttggcgaacccagcgcggtaatgggcaccgttggtaacggcctgctggggaaagtgatcccgacagaaaatacaaccggttcggcagtcgatgttcagcatgagctggcggggctggtggatcagggcgcgactttttgcgcaatggaagtttcatcccacgggctggtacaacaccgtgtggcggcattgaaatttgcggcgtcggtctttaccaacttaagccgcgatcaccttgattatcatggtgatatggaacactacgaagccgcgaaatggctgctttattctgcacatcattgcggtcaggcgattattaacgccgacgatgaagtgggccgccgctggctggcaaaactgccggacgcggttgcggtatcaatggaagatcatatcaatccgaactgtcacggacgctggttgaaagcgaccgacgtgaactatcacgacagcggtgcgaccattcgctttagctcgagttggggcgatggggaaattgaaagtcgcctgatgggcgcattcaacgtcagcaacctgctgctggcgctggcgacactgctggcactcggctatccgctggctgatttgctgaaaaccgccgcgcgtctgcaaccggtttgcggacgtatggaagtgttcactgcaccaggcaaaccgacggtggtggtggattacgcgcatacgccggatgcactggaaaaagccttacaggcggcgcgcctgcactgtgcgggcaagctgtggtgcgtctttggctgcggtggcgatcgtgataaaggcaaacgtccactgatgggcgcaattgctgaagagtttgctgacgtggcggtggtgacggacgataacccgcgtaccgaagagcctcgtgccatcatcaacgatattctggcgggaatgttagatgccggatatgccaaagtgatggaaggccgtgctgaagcggtgacttgcgccgttatgcaggctaaagagaatgatgtggtactggtcgcgggcaaaggccatgaggactaccagattgttggcaatcagcgtctggactactccgatcgcgtcacggtggcgcgtctgctgggggtgattgcatgattagcgtaacccttagccaacttaccgatattctcaacggtgaactgcaaggtgcagatattacccttgatgctgtaaccactgacacgcgaaaactgacgccgggctgcctgtttgttgccctgaaaggcgaacgtttcgatgctcatgattttgccgaccaggcgaaagctggcggcgcaggcgcactactggttagccgtccgctggatattgatctgccgcagttaatcgtcaaggatacgcgtctggcgtttggtgaactggctgcatgggttcgccagcaagttccggcgcgcgtggttgctctgacaggttcctccggcaaaacctccgttaaagagatgacggcggcaattttaagccagtgcggcaacacactttatacggcaggcaatctcaataacgacatcggtgtaccgatgacgctgttgcgcttaacgccggaatacgattacgcagttattgaacttggcgcgaaccatcagggtgaaattgcctggactgtgagtctgactcgcccggaagcggcgctggtcaacaacctggcagcggcgcatctggaaggttttggctcgcttgcgggtgtcgcgaaagcgaaaggtgaaatctttagcggcctgccggaaaacggtatcgccattatgaacgccgacaacaacgactggttgaactggcagagcgtaattggctcacgcaaagtgtggcgtttctcacctaatgccgccaacagcgatttcaccgccaccaatatccatgtaacctcacacggtacggaatttaccctgcaaacccctacaggtagcgtcgatgttctgctgccgttgccggggtgtcacaatattgcgaatgcgctggcagccgctgcgctctccatgtccgtgggcgcaacgcttgatgctatcaaagcggggctggcaaatctgaaagctgttccaggccgtctgttccccataaaactggcagaaaaccagttgctgctcgacgactcctacaacgccaatgtcggttcaatgaccgccgctgttcaggttctggctgaaatgccgggctaccgcgtgctggtggtgggcgatatggcggaactgggcgctgaaagcgaagcctgccatgtacaggtgggcgaagcggcaaaagctgctggtattgaccgcgtgttaagtgtgggtaaacaaagccatgctatcagcactgccagcggcgttggcgaacatttttccgataaaactgcgcttatcgcgcgtcttaaatcactgattgctgagcaacaggtaattacgattttagttaagggttcacgtagtgctgccatggaagaggtagtacgcgctttacaggagaatgggacatgttagtttggctggccgaacatttggtcaaatattattccggctttaacgtcttttcctatctgacgtttcgcgccatcgtcagcctgctgactgcgctgttcatctcattgtggatgggcccgcgcatgattgctcatttgcaaaaactttcctttggtcaggtagtgcgtaacgacggtcctgaatcacacttcagcaagcgcggtacgccgaccatgggcgggattatgatcctgacggcgattgtgatctccgtgctgctgtgggcttacccgtccaatccgtacgtctggtgcgtactggtggtgctggtaggttacggtgttattggctttgttgatgattatcgcaaagtggtgcgtaaagacaccaagggcctgattgcccgttggaagtatttctggatgtcggtgattgcgctgggtgtcgccttcgcgctgtaccttgtcggcaaagacacgcccgcaacgcagctggtggtcccattctttaaagatgtgatgccgcaactggggttgttctacattctgctggcttacttcgtcattgtgggtactggcaacgcggtaaacctgaccgatggtctcgacggtctggcaattatgccgaccgtatttgtcgccggtggttttgcgctggtggcgtgggcgaccggcaacatgaactttgccagctatttacacataccgtatctacgacacgccggggaactggtcattgtctgtaccgcgatagtcggggcagggctgggcttcctgtggtttaacacctatccggcgcaggtttttatgggcgatgtaggttcgctggcgttaggtggtgcgttaggtattatcgccgtactgctgcgtcaggaattcctgctggtgattatggggggcgtgttcgtggtagaaacgctttccgtcatcctgcaggtcggctcctttaaactgcgcggacagcgtattttccgcatggcaccgattcatcaccactatgaactgaaaggctggccggaaccgcgcgtcattgtgcgtttctggattatttcgctgatgctggtcctgattggtctggcaacgctgaaggtacgttaatcatggctgattaccagggtaaaaatgtcgtcattatcggcctgggcctcaccgggctttcttgcgtggactttttcctcgctcgcggtgtgacgccgcgcgttatggatacgcgtatgacaccgcctggcctggataaattacccgaagccgtagaacgccacacgggcggtctgaatgatgaatggctgatggcggcagatctgattgtcgccagtcccggtattgcactggcgcatccatccttaagcgctgccgctgatgccggaatcgaaatcgttggcgatatcgagctgttctgtcgtgaagcacaagcaccgattgtggcgattaccggttctaacggcaaaagcacggtcaccacgctagtgggtgaaatggcgaaagcggcgggggttaacgttggtgtgggtggcaatattggcctgcctgcgttgatgctgttggatgatgagtgcgaactgtacgtgctggaactgtcgagcttccagctggaaaccacctccagcttacaggcggtagcagcgaccattctgaacgtgactgaagatcatatggatcgctatccgtttggtttacaacagtatcgtgcagcaaaactgcgcatttacgaaaacgcaaaagtttgcgtggttaatgctgatgatgccttaacaatgccgattcgcggtgcggatgaacgctgcgtcagctttggcgtcaacatgggcgactatcacctgaatcatcagcagggcgaaacctggctgcgggtgaaaggcgagaaagtgctgaacgtgaaagaaatgaaactttccgggcagcataactacaccaatgcgctggcggcgctggcgctggcagatgccgcagggttaccgcgtgccagcagcctgaaagcgttaaccacattcactggtctgccgcatcgctttgaagttgtgctggagcataacggtgtgcgctgggttaacgattcaaaagcgaccaacgtcggcagtacggaagcggcgctgaatggcctgcatgtagacggcacgctgcatttgttgctgggtggcgatggtaaatcggcggactttagcccactggcgcgttacctgaatggcgataacgtacgtctgtattgtttcggtcgtgacggcgcgcagctggcggcgctacgcccggaagtggcagaacaaaccgaaactatggaacaggcgatgcgcttgcttgctacgcgtgttcagccgggcgatatggttctgctctccccggcctgtgccagccttgatcaattcaagaactttgaacaacgaggcaatgagtttgcccgtctggcgaaggagttaggttgatgcgtttatctctccctcgcctgaaaatgccgcgcctgccaggattcagtattctggtctggatctccacggcgctaaagggctgggtgatgggctcgcgggaaaaagataccgacagcctgatcatgtacgatcgcaccttactgtggctgaccttcggcctcgcggcgattggctttatcatggtgacctcggcgtcaatgcccatagggcaacgcttaaccaacgatccgttcttcttcgcgaagcgtgatggcgtctatctgatcctggcattcattctggcgatcattacgctgcgtctgccgatggagttctggcaacgctacagtgccacgatgctgctcggatctatcatcctgctgatgatcgttctggtagtgggtagctcggttaaaggggcatcgcgttggatcgatctcggtttgctgcgtattcagcctgcggagctgacaaaactgtcgctgttttgctatatcgccaactatctggtgcgtaaaggcgacgaagtacgtaataacctgcgcggcttcctgaaaccgatgggcgtaattctggtgttggcagtgttactgctggcacagccagaccttggtacggtggtggtgttgtttgtgactacgctggcgatgttgttcctggcgggagcgaaattgtggcagttcattgccattatcggtatgggcatttcagcggttgtgttgctgatcctcgccgaaccgtaccgtatccgccgtgttaccgcattctggaacccgtgggaagatccctttggcagcggctatcagttaacgcaatcgttgatggcgtttggtcgcggtgaactgtggggacaaggtttaggtaactcggtacaaaaactggagtatctgccggaagcgcacactgactttattttcgccattatcggcgaagaactggggtatgtcggtgtggtgctggcacttttaatggtattcttcgtcgcttttcgcgcgatgtcgattggccgcaaagcattagaaattgaccaccgtttttccggttttctcgcctgttctattggtatctggtttagtttccaggcgctggttaacgtaggcgcggcggcggggatgttaccgaccaaaggtctgacattgccgctgatcagttacggtggttcgagcttactgattatgtcgacagccatcatgatgctgttgcgtattgattatgaaacgcgtctggagaaagcgcaggcgtttgtacgaggttcacgatgagtggtcaagggaagcgattaatggtgatggcaggcggaaccggtggacatgtattcccggggctggcggttgcgcaccatctaatggctcagggttggcaagttcgctggctggggactgccgaccgtatggaagcggacttagtgccaaaacatggcatcgaaattgatttcattcgtatctctggtctgcgtggaaaaggtataaaagcactgatagctgcgccgctgcgtatcttcaacgcctggcgtcaggcgcgggcgattatgaaagcgtacaaacctgacgtggtgctcggtatgggcggctatgtatcaggtccaggtggtctggccgcgtggtcgttaggcattccggttgtacttcatgaacaaaacggtattgcgggcttaaccaataaatggctggcgaagattgctaccaaagtgatgcaggcgtttccaggtgctttccctaatgcggaagtggtgggtaacccggtgcgtaccgatgtgctggcgctgccgttgccgcagcaacgtttggctggacgtgaaggtccggttcgtgtgttggtagtgggtggttcccagggcgcacgcattcttaaccagacaatgccgcaggttgctgcgaaactgggtgattcagtcactatctggcatcagagcggcaaaggttcgcaacaatccgttgaacaggcgtatgccgaagcgggacaaccgcagcataaagtgacggaatttattgatgatatggcggcggcgtatgcgtgggcggatgtcgtcgtttgccgctccggtgcgttaacggtgagtgaaatcgccgcggcaggactaccggcgttgtttgtgccgtttcaacataaagaccgtcagcaatactggaatgcgctaccgctggaaaaagcgggcgcagccaaaattatcgagcagtcacagcttagcgtggatgctgtcgccaacaccctggccgggtggtcgcgagaaaccttattaaccatggcagaacgcgcccgcgctgcatccattccggatgccaccgagcgagtggcaaatgaagtgagccgggctgcccgggcgtaattgtagcgatgccttttgcatcgtatgaatttaagaagttaatggcgtaaagaatgaatacacaacaattggcaaaactgcgttccatcgtgcccgaaatgcgtcgcgttcggcacatacattttgtcggcatcggtggtgccggtatgggcggtattgccgaagttctggccaatgaaggttatcagatcagtggttccgatttagcgccaaatccggtcacgcagcagttaatgaatctgggagcgacgatttatttcaaccatcgcccggaaaacgtacgtgatgccagcgtggtcgttgtttccagcgcgatttctgccgataacccggaaattgtcgcagctcatgaagcgcgtattccggtgatccgtcgtgctgaaatgctggctgagttaatgcgttttcgtcatggcatcgccattgccggaacacacggcaaaacgacaaccaccgcgatggtttccagcatctacgcagaagcggggctcgacccaaccttcgttaacggcgggctggtaaaagcggcgggggttcatgcgcgtttggggcatggtcggtacctgattgccgaagcagatgagagtgatgcatcgttcctgcatctgcaaccgatggtggcgattgtcaccaatatcgaagccgaccacatggatacctaccagggcgactttgagaatttaaaacagacttttattaattttctgcataacctgccgttttacggtcgtgcggtgatgtgtgttgatgatccggtgatccgcgaattgttaccgcgtgtggggcgtcagaccacgacttacggcttcagcgaagatgccgacgtgcgtgtagaagattatcagcagattggcccgcaggggcactttacgctgctgcgccaggacaaagagccgatgcgcgtcaccctgaatgcgccaggtcgtcataacgcgctgaacgccgcagctgcggttgcggttgctacggaagagggaattgacgacgaggctattttgcgtgcgctggagagcttccaggggacagggcgccgtttcgatttcctcggtgaattcccgctggagccagtgaatggtaaaagcggtacggcaatgctggtcgatgactacggccaccacccgacggaagtggacgccactattaaagcggcgcgtgcaggctggccggataaaaacctggtaatgctgtttcagccgcaccgttttacccgtacgcgcgacctgtatgatgatttcgccaatgtgctgacgcaggttgataccctgttgatgctggaagtgtatccggctggcgaggcgccaattccgggagcggacagccgttcgctgtgtcgcacaattcgtggacgtgggaaaattgatcccattctggtgccggacccggcgcaggtagccgagatgctggcaccggtattaaccggtaacgacctgattctcgttcagggggctggtaatatcggaaaaattgctcgttctttagctgaaatcaaactgaagccgcaaactccggaggaagaacaacatgactgataaaatcgcggtcctgttgggcgggacctccgctgagcgggaagtttctctgaattctggcgcagcggtgttagccgggctgcgtgaaggcggtattgacgcgtatcctgtcgacccgaaagaagtcgacgtgacgcaactgaagtcgatgggttttcagaaagtgtttatcgcgctacacggtcgcggcggtgaagatggtacgctgcagggcatgctcgagctgatgggcttgccttataccggcagcggagtgatggtatctgcgctttcaatggataaactacgcagcaaacttctgtggcagggtgccggtttaccggtcgcgccgtgggtagcgttaacccgcgcagagtttgaaaaaggccttaacgataagcagttagcagaaatttcttctctgggtttgccggttatcgttaagccgagccgcgaaggttccagtgtgggaatgtcaaaagtagtagcagaaaatgctctacaagatgcattaagattggcatttcagcacgatgaagaagtattgattgaaaaatggctaagtgggccggagttcacggttgcgatactcggtgaagaaattttaccgtcaatacgtattcaaccggccggaaccttctatgattatgaggcgaagtatctctctgatgagacacagtatttctgccccgcaggtctggaagcgttacaagaggccaatttgcaggcattagtgctaaaagcatggacgacgttaggttgcaaaggatggggacgtattgacgttatgctggacagcgatggacagttttatctgctggaagccaatacctcaccgggtatgaccagccacagtctggtaccgatggcggcacgtcaggcaggtatgagcttctcgcagttggtagtacgaattctggaactggcggactaatatgtcgcaggctgctctgaacacgcgaaatagcgaagaagaggtttcttctcgccgcaataatggaacgcgtctggcggggatccttttcctgctgaccgttttaacgacagtgttggtgagcggctgggtcgtgttgggctggatggaagatgcgcaacgcctgccgctctcaaagctggtgttgaccggtgaacgccattacacgcgtaatgacgatatccggcagtcgatcctggcattgggtgagccaggtacctttatgacccaggatgtcaacatcatccagacgcaaatagaacaacgcctgccgtggattaagcaggtgagcgtcagaaagcagtggcctgatgaattgaagattcatctggttgaatatgtgccgattgcgcggtggaatgatcaacatatggtagacgcggaaggaaacaccttcagcgtgccgccagatcgcaccagcaagcaggtgcttccaatgctgtatggcccggaaggcagcgccaatgaagtgttgcagggctatcgcgaaatggggcagatgctggcaaaggacagatttactctgaaggaagcggcgatgaccgcgcgacgttcctggcagttgacgctgaataacgatattaagctcaatcttggccggggcgatacgatgaaacgtttggctcgctttgtagaactttatccggttttacagcagcaggcgcaaaccgatggcaaacggattagctacgttgatttgcgttatgactctggagcggcagtaggctgggcgcccttgccgccagaggaatctactcagcaacaaaatcaggcacaggcagaacaacaatgatcaaggcgacggacagaaaactggtagtaggactggagattggtaccgcgaaggttgccgctttagtaggggaagttctgcccgacggtatggtcaatatcattggcgtgggtagttgcccgtcgcgtggtatggataaaggcggggtgaacgacctcgaatccgtggtcaagtgcgtacaacgcgccattgaccaggcagaattgatggcagattgtcagatctcttcggtatatctggcgctttctggtaagcacatcagctgccagaatgaaattggtatggtgcctatttctgaagaagaagtgacgcaagaagatgtggaaaacgtcgtccataccgcgaaatcggtgcgtgtgcgcgatgagcatcgtgtgctgcatgtgatcccgcaagagtatgcgattgactatcaggaagggatcaagaatccggtagggctttcgggcgtgcggatgcaggcaaaagtgcacctgatcacatgtcacaacgatatggcgaaaaacatcgtcaaagcggttgaacgttgtgggctgaaagttgaccaactgatatttgccggactggcatcaagttattcggtattgacggaagatgaacgtgaactgggtgtctgcgtcgtcgatatcggtggtggtacaatggatatcgccgtttataccggtggggcattgcgccacactaaggtaattccttatgctggcaatgtcgtgaccagtgatatcgcttacgcctttggcacaccgccaagcgacgccgaagcgattaaagttcgccacggttgtgcgctgggctccatcgttggaaaagatgagagcgtggaagtgccgagcgtaggcggtcgtccgccgcggagtctgcaacgtcagaccctggcagaggtgatcgagccgcgctataccgagctgctcaatctggtcaacgaagagatattgcagttgcaggaaaagcttcgccaacaaggggttaaacatcacctggcggcaggcattgtattaaccggtggcgcagcgcagatcgaaggtcttgcagcctgtgctcagcgcgtgtttcatacgcaagtgcgtatcggcgcgccgctgaacattaccggtttaacggattatgctcaggagccgtattattcgacggcggtgggattgcttcactatgggaaagagtcacatcttaacggtgaagctgaagtagaaaaacgtgttacagcatcagttggctcgtggatcaagcgactcaatagttggctgcgaaaagagttttaatttttatgaggccgacgatgattacggcctcaggcgacaggcacaaatcggagagaaactatgtttgaaccaatggaacttaccaatgacgcggtgattaaagtcatcggcgtcggcggcggcggcggtaatgctgttgaacacatggtgcgtgagcgcattgaaggtgttgaattcttcgcggtaaataccgatgcacaagcgctgcgtaaaacagcggttggacagacgattcaaatcggtagcggtatcaccaaaggactgggcgctggcgctaatccagaagttggccgcaatgcggctgatgaggatcgcgatgcactgcgtgcggcgctggaaggtgcagacatggtctttattgctgcgggtatgggtggtggtaccggtacaggtgcagcaccagtcgtcgctgaagtggcaaaagatttgggtatcctgaccgttgctgtcgtcactaagcctttcaactttgaaggcaagaagcgtatggcattcgcggagcaggggatcactgaactgtccaagcatgtggactctctgatcactatcccgaacgacaaactgctgaaagttctgggccgtggtatctccctgctggatgcgtttggcgcagcgaacgatgtactaaaaggcgctgtgcaaggtatcgccgaactgattactcgtccgggtttgatgaacgtggactttgcagacgtacgcaccgtaatgtctgaaatgggctacgcaatgatgggttctggtgtggcgagcggtgaagatcgtgcggaagaagctgctgaaatggctatctcttctccgctgctggaagatatcgacctgtctggcgcacgcggcgtactggtaaacatcacagcgggcttcgacctgcgtctggatgagttcgaaacggtaggtaacaccatccgtgcatttgcttccgacaacgcgaccgtggttatcggtacttctcttgacccggatatgaatgacgagctgcgcgtaactgttgttgcgacaggtatcggcatggacaaacgtcctgaaatcactctggtgactaataagcaggttcagcagccagtgatggatcgctaccagcagcacgggatggctccgctgacccaggagcagaagccggttgctaaagtcgtgaatgacaatgcgccgcaaactgcgaaagagccggattatctggatatcccagcattcctgcgtaagcaagctgattaagaattgactggaatttgggtttcgaggctctttgtgctaaactggcccgccgaatgtatagtacacttcggttggataggtaatttggcgagataatacgatgatcaaacaaaggacacttaaacgtatcgttcaggcgacgggtgtcggtttacataccggcaagaaagtcaccctgacgttacgccctgcgccggccaacaccggggtcatctatcgtcgcaccgacttgaatccaccggtagatttcccggccgatgccaaatctgtgcgtgataccatgctctgtacgtgtctggtcaacgagcatgatgtgcggatttcaaccgtagagcacctcaatgctgctctcgcgggcctgggcatcgataacattgttatcgaagttaacgcgccggaaatcccgatcatggacggcagcgccgctccgtttgtatacctgctgcttgacgccggtatcgacgagttgaactgcgctaagaaatttgttcgcattaaagaaactgttcgtgtcgaagatggcgataagtgggctgaatttaagccgtacaatggtttttctctggatttcaccatcgattttaaccatccggctattgattccagcaaccagcgctatgcgatgaacttctccgctgatgcgtttatgcgccagatcagccgtgcgcgtacgttcggtttcatgcgtgatatcgaatatctgcagtcccgtggtttgtgcctgggcggcagcttcgattgtgccatcgttgttgacgattatcgcgtactgaacgaagacggcctgcgttttgaagacgaatttgtgcgtcacaaaatgctcgatgcgatcggtgacttgttcatgtgtggtcacaatattattggtgcatttaccgcttataaatccggtcatgcactgaataacaaactgctgcaggctgtccttgcaaaacaggaagcctgggaatatgtgaccttccaggacgacgcagaactgccgttggccttcaaagcgccttcagccgtactggcataacgacatttatactgtcgtataaaattcgactggcaaatctggcactctctccggccaggtgaaccagtcgtttttttttgaattttataagagctataaaaaacggtgcgaacgctgttttcttaagcacttttacgcacaacttatcttcattcgtgctgtggacttcaggctttaatgataagatttgtgcgctaaatacgtttgaatacgatcgggatggcaataacgtgagtggaatactgacgcgctggcgacagtttggtaaacgctacttctggccgcatctcttattagggatggtcgcggcgagtttaggtttgcctgcactcagcaatgccgccgaaccaaacgcgcccgcaaaagcgacaacccgcaaccacgagccttcagccaaagttaactttggtcaattggccttgctggaagccaacacgcgccgcccgaattcgaactattccgttgattactggcatcaacatgccattcgcacggtaatccgccatctttccttcgcaatggcaccgcaaacgctgcccgttgctgaagaatctttgcctcttcaggcgcaacatcttgcattactggatacgcttagcgcgcttctgacccaggaaggcacgccgtctgaaaagggttatcgcattgattatgcgcattttaccccacaagcaaaattcagcacgcccgtctggataagccaggcgcaaggcatccgtgctggccctcaacgcctcagctaacaacaataaacctttacttcattttattaactccgcaacgcggggcgtttgagattttattatgctaatcaaattattaactaaagttttcggtagtcgtaacgatcgcaccctgcgccggatgcgcaaagtggtcaacatcatcaatgccatggaaccggagatggaaaaactctccgacgaagaactgaaagggaaaaccgcagagtttcgtgcgcgtctggaaaaaggcgaagtgctggaaaatctgatcccggaagctttcgccgtggtgcgtgaggcaagtaagcgcgtctttggtatgcgtcacttcgacgttcagttactcggcggtatggttcttaacgaacgctgcatcgccgaaatgcgtaccggtgaaggtaaaaccctgaccgcaacgctgcctgcttacctgaacgcactaaccggtaaaggcgtacacgtagttaccgtcaacgactacctggcgcaacgtgacgccgaaaacaaccgtccgctgtttgaattccttggcctgactgtcggtatcaacctgccgggcatgccagcaccggcaaagcgtgaagcctacgctgctgacatcacttacggtacgaacaacgaatacggctttgactacctgcgcgacaacatggcattcagccctgaagaacgtgtacaacgtaaactgcactatgcgctggtggacgaagtggactccatcctcatcgatgaagcgcgtacaccgctgatcatttccggcccagcagaagacagctcggaaatgtataaacgcgtgaataaaattattccgcacctgatccgtcaggaaaaagaagactccgaaaccttccagggcgaaggccacttctcggtggatgaaaaatctcgccaggtgaacctgaccgaacgtggtctggttctgattgaagaactgctggttaaagaaggcatcatggatgaaggtgagtctctgtactctccggccaacatcatgctgatgcaccacgtaacggcggcgctgcgcgctcatgcgctgtttacccgcgacgtcgactacatcgttaaagatggtgaagttatcatcgttgacgaacacaccggtcgtaccatgcagggccgtcgctggtccgatggtctgcaccaggctgtggaagcgaaagaaggtgtgcagatccagaacgaaaaccagacgctggcttcgatcaccttccagaactacttccgtctgtatgaaaaactggcggggatgactggtactgctgataccgaagctttcgaattcagctccatctataagctggatactgtcgttgttccgaccaaccgtccaatgattcgtaaagatctgccggacctggtctacatgactgaagcggaaaaaattcaggcgatcattgaagatatcaaagaacgtactgcgaaaggccagccggtgctggtgggtacaatctccatcgaaaaatcggagctggtgtcaaatgaactgaccaaagccggtattaagcacaacgtcctgaacgccaaattccatgccaacgaagcggcgattgttgctcaggcaggttatccggctgcggtgactatcgcgaccaacatggcgggtcgtggtaccgatattgtgctcggtggtagctggcaggcagaagttgccgcgctggaaaatccgactgcagagcaaattgaaaaaattaaagccgactggcaggtacgtcacgatgcggtactggcagcaggtggcctgcatatcatcggtactgaacgtcacgaatcccgtcgtatcgataaccagctgcgcggtcgttctggtcgtcagggggatgctggttcttctcgtttctacctgtcgatggaagatgcgctgatgcgtatttttgcttccgaccgagtatccggcatgatgcgtaaactgggtatgaagccaggcgaagccattgagcacccgtgggtgaccaaagcgattgccaacgcccagcgtaaagttgaaagccgtaacttcgacattcgtaagcaactgctggaatatgatgacgtggctaacgatcagcgtcgcgccatttactcccagcgtaacgaactgctggatgtcagcgatgtgagcgaaaccatcaacagcattcgtgaagatgtgttcaaagcgaccattgatgcctacattccgccacagtcgctggaagaaatgtgggatattccggggctgcaggaacgtctgaagaacgatttcgacctcgatttgccaattgccgagtggctggataaagaaccagaactgcatgaagagacgctgcgtgagcgcattctggcgcagtccatcgaagtgtatcagcgtaaagaagaagtggttggtgctgagatgatgcgtcacttcgagaaaggcgtcatgctgcaaactctcgactctctgtggaaagagcacctggcagcgatggactatctgcgtcagggtatccacctgcgtggctatgcacagaaagatccgaagcaggaatacaaacgtgaatcgttctccatgtttgcagcgatgctggagtcgttgaaatatgaagttatcagtacgctgagcaaagttcaggtacgtatgcctgaagaggttgaggagctggaacaacagcgtcgtatggaagccgagcgtttagcgcaaatgcagcagcttagccatcaggatgacgactctgcagccgcagctgcactggcggcgcaaaccggtgaacgcaaagtaggacgtaacgatccttgcccgtgtggttctggtaaaaaatacaagcagtgccatggccgcctgcaataaaagctaacagttgaagtaaaaggcgcaggattctgcgccttttttataggtttaagacaatgaaaaagctgcaaattgcggtaggtattattcgcaacgagaacaatgaaatctttataacgcgtcgcgcagcagatgcgcacatggcgaataaactggagtttcccggcggtaaagttgaaatgggcgaaacgccggaacaggcggtggtgcgtgaacttcaggaagaagtcgggattaccccacaacatttttcgctatttgaaaaactggaatatgaattcccggacaggcatataactctgtggttctggctggtcgaaagctgggaaggggagccgtggggtaaagaagggcaacccggtgagtggatgtcgctggtcggtcttaatgccgatgattttccgccagccaatgaaccggtaattgcgaaacttaagcgtgtgtatgccggataaggcgtcacgctgcatccgacatttgcatatgatgcctgatgcgacgctggctgaactgcaccccaaatgttggacataatctgacatctgaaggtgcagtttatgaaacattcatttgaagtaaaacttgccgctgtaaatcattacctggctggtcatgcaggcatcatttctacggcaaaactctttcaactttctcacaccagcctctcacactggattaatctttttcttcttcacggtcctcgggcactggattgcagacacaagcgtagctattctcctgaagataaactttgcgtggttctttatgctctcgggcattctgagtctctaccccgggtagcagcccggtttaacattcccagccacaacacggttaaaaactggataaaaggctaccgcaaatctggtaatgaggcctttatcaggcgcaggaaggagaaaagcatgacccgttctgatgatacccatgaaaacgaggcaaacatgacgccggaagagatgaagaatgagctgcgttatcttcgcgcagaaaatgcatatctgaaagccatgcaggagcatcttctggaaaaaaagcgccaggagctggagaaaaaacgaaagtcatccagagcctgaggtacggacactgccagtctgacctgttaaaggccgcagggcagaagcacgctgtactaccagctgtcactgcagaaggctaaggacaagtatgctgatgtgaaacagctcatagcctccatcttccatgaacaccggggatgttatgggtaccggcggatccattgtgagcttcagaaaagaggtcttaagttcagtggcaaaacggtgagaaaactgatgcaacagctcggcctgaagtctcctgtgcgcctgaagaaataccggtcttaccggggaaatatgggactcgctgcagaaaatatccttcagcgacagttcaaagcggaagctccctgtgagaaatgggtgacagatatcaccgaattcagggctggcggacaaaaactgtacctgtccccgatacttgatttgttttacggggaaatcgtggcgtgggaaacggcctgcaggcctacagaggagctggtgaagcggatgttaaataagggtctggaaagccttgctgaaggggagaaaccgctgctccacagtgatcaaggatggcattaccggataaaaagttatcagtccgccctggcggacagagggttagtgcagagcatgtcgcgcaagggcaacagccttgataatgcggtaatggagaacttctttggtcacctgaaagaagaaatgtactatcgccgggactacagaaatgtagaagagctggaaaatgccgttaacgaatacataacttactggaatcaaaaaagaataaaactcagtcttgggggactcagcccggtagaataccggactgagtatcaaaaagccggttaactgaaactgtccaggttttggggttcagttcatggcgcgttttatcaggccagcgtcgcatcagatagaatgtcactgctttggctcttcgctccagtcatcgctttcggaaagatcgctactgctggggattcgtttttcttcagcagcccattctccgaggtcgatcagctgacaacgtttggagcaaaatggccgaaacgggctgatttcaccccacaccaccgttttcccgcaggttgggcaattcaccgtaatagtttctgacatttttactccttagcaacaggccagttcgaaatccagacgttctggtacctgtccgttttcactgtccagcggcataaaacgaatggcaaaacggctcttatgaccggaaatttgcggataaagctgtgaatcgagcgacagattcaggcgcagcaagtcggcatcgccaccgttatcctgataaaaaccattcaggctggtttgtttacggaagggggccgactggcgaattaaatccagcaccatggtaagtgcctgggtaagtgggttcaggctggcaatccaggtttctacctggctgtcgcgctgcgcctggggtagatgcagccaaatgtgcaatgtaggtaaatcaaagctgcaacagccgcccgggatgctcagtcgctgacgcaccagagcaatcaaacgatcttcacgtagaaattgcccgatacgcggcgcggagattaatacgctccccgccgcttttaactgctgaattaatgcttcaatacggctctggtccacgccgggcacgccaatccaggtctggagtttacgttgctgccggtcaagttctttcaacagctcagtgcggacttcgccgcgctcgaaaacatccagtaattcactgacattacggaagaaatgcagcgcgccagcgtggtcaacgatgggtagattaacggtgagttgctgaatcaaaaactcaatgcgcagccatgtacgcattttttcatttagtggatgttcaaaaaggacctgggtctgcattacggtttttcctgtgagacaaactgcgacgcaagctgcaaatagtatgcgtgcaggcgggcaacatccgatgcgatagcatccggtgcgccgttattatcaatgacgtcatctgccacggcaaggcgagcttcgcgcgttgcctgagcagcaaggatttgttcgacatgctcgcgagttacatcgtcgcgctgcatggtgcgcttaagttgcgtttctgggctgacatccaccaccagcactcgattcgcttttttatacagtgagttttctaccagcaatggcacaacccatagtacatagggggaagtagctcgctggatctggtgttgcgtctcttgctgaatcagcggatgcagcagggcgttaagccagtttttctcttccgggttggcgaagatccgctcgcgcaaggcccggcgctgcaatgttccatcagcagcaatcatgttagcgccaaagtgatcagcaatggcatgtagcgcaggtgcacctggttcaaccacctgacgcgcaataatatcggcatcaatgacgttaattccgagatcagcaaacgcattggcaacggtactcttgccactgccaatgcctcccgttaaggcaactatatacctcataatttatattcccgggaattcatcatgattatcaaaacgttaaaaatgagcgcacgaaagcgaaattgatgaaacgttcgctcactatttaccaggtaaatttatgggattgtagcgtaaaaaaagacaatttcgcagtcttgcgccgcattgattagtgcgtatgataacgtcactggagttgcgctcttacccttatagccattaaccccaggaatccgcacatgcgtattgaagaagatctgaagttaggttttaaagacgttctcatccgccctaaacgctccactcttaaaagccgttccgatgttgaactggaacgtcaattcaccttcaaacattcaggtcagagctggtccggcgtgccgattatcgccgccaatatggacaccgtaggcacattttctatggcctctgcgctggcttcttttgatattctgactgctgtgcataaacactattctgtcgaagagtggcaagcgtttatcaacaattcttccgctgatgtgctgaaacatgtgatggtttctaccggcacgtctgatgcggatttcgaaaaaactaaacagattctcgacctgaacccggcattaaattttgtttgtattgacgtggcgaatggttattccgaacactttgtgcagttcgttgcgaaagcgcgtgaagcgtggccgaccaaaaccatttgtgcaggcaacgtagtgactggtgaaatgtgtgaggagcttatcctctccggtgccgatatcgttaaagttggcattggcccaggttctgtttgtacaactcgcgtcaaaacaggcgtcggttatccgcaactttctgcggtgatcgaatgcgccgatgctgcgcacggtctgggcggaatgatcgtcagcgatggcggctgcaccacgccgggcgatgtcgcgaaagcctttggcggcggtgccgatttcgtaatgcttggcggcatgctggcgggccacgaagagagcggcggtcgcatcgttgaggagaacggcgagaaatttatgctgttctacggcatgagctcagagtctgcgatgaaacgtcacgttggcggcgttgcggaatatcgcgcagcagaaggtaaaaccgttaagctgccgctgcgaggcccggttgaaaataccgcgcgtgatattttgggcggcctgcgttcagcttgtacatacgttggggcttcacgcctgaaagaactgaccaagcgcaccacgtttatccgtgtgcaggaacaagaaaaccgcatcttcaacaacctgtaatataccaacgctggcgtggagcaacacgccagcgttatcccattccactcatcgcatcgcctaaatggaaaattggcagatacattgccaccaccagcgtaccgataattcctcccgttatgatcagcaacgccggttccagtaaggctgcgaggttatccgccagtgccattgtgttatcccgatgatgatgggcgaggttgtctaacatgagatccagcgagccggatgcctctcctgttctcactaattgcaaacagagcgggctaaactcaccggcattttttagcgccagccagatggggtgaccgttactgatatcgtgctggatttgtgtcagaagttgcacccagtacgggcagcgcattgtttctctgacgctctcaacgccctgtaaaaaagaaatgcctgcactttgtgtcagtgtcagaatcgtaaagatctgcgtgagtttttgtccccgcatcagtgaacccataatcgggatgcgtaacagcaatttctgccgtgcgataagcctggttgggtggcgcatcagcagcttattggctatcgccagcagaaagccgaatagcaccagcaaccaaccccattcgccactaaaacttgccagcgtcatgatcccctgcgttagcgccggtagcggagtgttaaaggtcttatagatagcggcaaactccggcagtacaaaatgcagcattgccacaaccaccatgattgccatcgctaaaatgataatgggataacgtaacgctgatttcactttgtcggtcaactgacgctgggctttttgctgacgcgccagttcaaagcagcattcatccagcttaccggtcagttcacccgtgcggatcatcgcctgatagagcggcggaaatacctctgaccagggtaataaggcattggaaaaggcaacgccctgttcaagatcgtgcgccagtgattgcagcaacgcttgccactgcttactgggatgctgttccgccagcagagccagcccttcagaaagcgttaacccggctttgagtagcgtcgccagttgatgaatgacttccgcgcttttatctcctcgccactgcgcagaattgatggcgattcgcttcaggcttagtggggtaaccatctgttgctgtagtgccatgagcagcaaagcacggctctctgcccatagcatcccatcttgcgcattgccgtcgccggttatgccatgccagcgccagagttgcttactcgccatgcggcatccccaatacgcggattaactcttcaaaggtggttaagccttgctccacggccaggcagccgttttcaaaaagcgttcgcatacccgcctgtcgggcgtgcgtttccagcgattcaacgtcggtattagcggaaataagctgacgtatgaccggtgttatgggcagaacttcaaataaggccgtgcgaccataaaaaccgtggtagcaatgtacacaaccgggtgcctgccagtggggcagcggcgatggccatacattgtctggaatatggatgggctccccttgctgccggcgacaatgcgggcaaagtttgcgtaccagacgctgggctattaccagcgtaagcgccgatgatagcatccagcgggcgactcccatttgctgtaaacgtaccagcgtttcgcaggtggaattagtgtgtagggtagacaacaccaggtgaccggtttgcgcggctttaatggcaatttctgccgtttcgccatcgcggatctctccgatcatgatgacgtcaggatcctggcgcaataacgcacgcaaaacgccctgaaaggtgagtccggcacgcgaatggatttgcgtctggtttagtccggctatggggatctcaaccggatcttcgacgctacaaatattaatgtcagcggtattcagcgtttgcagggcactataaagcgtgaccgttttgccgctgcctgtagggccagttaccagcaccagtccctgtggttgttgcaaggcatgagcaaagtccaccagttgtgacggctgcattccaagcgtgttaacatccagtgcctggttcacctgctgtaacaaccttaataccaccttttcaccaccccgacatgctaaggtcgcaatacgaaatgagacggcgtttcctgccagttcgacagtgaattgcccgtcctgcggcaggcgatgttccgcaatatccaggtttcccagcacttttaatctggcggttaatgcgactccggcatccggtgaaacgtccggtaaaggatgcaatacgccgtcgatacgcaagcggatgcggtaggcattgtccgctggttcgatatgaatatcagacgcgcgttgttctagcgcagattgtaacgttcgagtcagcaactctgctttgggctgatgcttctcctgaacagctacgggcaatgtctgttgtgtgcgactggcgtgaccttccatttgttggcgcgtccagcaggtgatctcaatacgtttggtggtagcgaaatgcaatgcgtccagtagctcatgcgaaggtgcatcgactaccgcaacatgaaccacctcttcgctggcatccagcaagactccctgataacgcagacacagggcggtgagctgtggaatattcattgccgctccttagttggcgtcatcaaagcggaagacatcttcgcaggcttgctgcaatgcgctgtcactttgaatagtgcagttacgcgtccagccggtgacgccgtttgcgttatcccaacccggtgtcatgacgacgcttagcccattgagactttcttgcccggtcagcgacaccacgccctttgccacactcatggctgaaacatagcgggtggtggtaggcgaaggaatgccattgctgccaccgtcgcaggtatttaatccaccatgttccagcgcgcacaactctacggcggtacggtaaggcacaaaggtttgtagcatgtcggtgagtgcggctttgcgcaggtagttttgataagcgggaataccaatggcgcttaaaatggcaatgatgccaataaccaccatcagttcgataagtgtaaaaccgcgttgcttgtccatctgtttcgctccttgattgggttggcgctactttggcaaacgccatcagcacaagcgaggggcaaaaaacgaaacgggaaagcagcttccgaggttttttatttcgttgcagcgaaagacaagaaatttgcgaggcgttacgaagaaagttggggaaggggagatttatccgcccgcgatggagcggataaatctgtcagcaattagcgaaaacgcattgaaaggtcgagtgcctgtacgtgtttagttagcgcaccaacggagataaagtccacgcccgtttcggcaaattcgcgcagtgttttgtcagtgacgttgccagacacttccagtagcgccttgccgttggtgcgtttgacggcttcgcgcatctgttctgtttcgaagttatccagcatgatgatatcggcacctgctttcagagcttcatcaagttcttccagattctctacttcgacttctactggcgcatccgggtgcaaccaggacgctttttcgaccgcctggcgcactgagccggaggcaataatatggttttctttgatcaggaaggcatcagaaagccccagacggtgattcgctccgccgccgcaaagtaccgcgtatttcagagctgaacgcaggccgggtaaggttttgcgcgtatccaacagctgcgtgttggtgccttccagtaattcgacatagtggcgtaccttactggcaactcctgaaagggtttgcacaaaattaagcgcagtgcgttcgcccgttaacagcacgcgagatgggccttcaagttcgaacaagggttgattggcgttgatgacatcgccgtcatccacatgccagataatggtgacatcgtcgcctgccagttgaataaacacctcttcaacccagcgtttgccgcaaaatacgccattctcgcgggtgatcactgtggcatgagagcgagagttttccggtaaaagttttgccgtaatgtcattgttggcatcgactgttccgcctaaatcttcccgtagcgcctgggccaccgcgccggggatatcgagattaatgcgttccagcagctcgtcacgtcgggtgtcagggttatagcggcgaggcggcatgttaaaactccagatagctaacgaatcataaggtagaaacatgctactctgaaccgggtattagcaccacatataaggagatcctgcatgttgttagaacaggggtggctggttggcgcgcgccgcgttccctcaccacattacgattgccgcccggatgacgaaacacccaccctgctggtggtgcacaatattagcctgccgccaggcgagtttggcggtccgtggatcgacgcattattcactggaactattgatccgcaggcgcatcctttctttgctgagatcgcccatttgcgcgtctccgctcactgtttgattcgccgtgatggtgaaatagtccagtatgttcctttcgataaacgtgcctggcatgcgggagtctctcagtatcaggggcgtgaacgctgcaatgatttttctattgggattgagctggaaggcaccgatacgctggcgtataccgatgcgcagtatcaacagcttgcggcggttacgcgggcactgattgatcgctatccagatatcgctaataacatgacgggccattgtgatattgcgccggatcggaaaaccgatcccggccctgcatttgattgggcacggtttcgtgcactggtcagcaaggagacaacatgacgctatttacaaccttactggtgttaattttcgagcgcctgtttaagttgggcgagcactggcagcttgatcatcgtcttgaagcgttctttcggcgggtgaaacatttttctctcgggcgcacattaggcatgaccattattgcgatgggcgtgacttttttactgttacgcgcattgcagggagtattgttcaacgttcccacgctgctggtgtggctgctgattggtttgctgtgtattggcgcaggtaaagttcgtcttcattatcatgcttatctgacagctgcttcacgtaatgatagccatgcccgtgccacgatggctggcgaactcaccatgattcacggcgtcccggcaggctgcgataaacgtgagtatttgcgtgagctgcaaaatgcattgctgtggattaactttcgtttttatcttgctccgctgttctggctgattgtggggggaacctggggacccgttacgctgatggggtatgcgtttttgcgtgcatggcaatactggctggcgcgataccagacgccgcatcatcgtttacagtccggcattgatgccgtgcttcatgtactggattgggtgccggttcgtcttgcgggtgtggtatatgccttgatcggtcatggtgagaaagcgttaccggcctggtttgcttcgctgggtgatttccatacttcgcaatatcaggtattaacgcgtctggcacagttctctctggcgcgtgaaccgcatgtcgataaggtggagacgccaaaggcagcggtttcaatggcgaagaaaacctcgttcgtggtcgtggtggttattgcgctactgacgatttacggggcgttggtgtaaagattattgccctcaccctgcacgggtgagggcgtagagagattaatgcgcttttacggctttggcggttttctctttaaacagatagcctatacctaacacgatcagccataccgggatcaggtataccgaaatcgccattcctggggtcatcagcataatcaccagtaccgccgccataaacagcaggcagatccagttacccagcggataaagcagggcagggaagcgagttaccacgccttgttcttgtttggcacgacggaatttcatatgcgccagactgatcatcgcccagttgatgaccagtgcagataccaccagcgccattaacagtccgaaagcggactctggggcaaggtagttaatcagtacgcacaatgccgtaaccagcgcagacaccagaatagtgttaaccggtacgccgcgtttatcgacagacgccagcgcttttggcgcgttcccttgttgtgccagaccgaacagcatacggctgttgcaatatacgcagctgttgtacacggagagcgcagcggtcagtaccacgatattcagcgcattcgctacaaaggtatcgcctaactcgtggaagatcagcacaaacggactggtatcggcggtaacgcgggtccacggcattagtgagagcagaacggctaacgagccaatatagaaaatcaggatgcggtagataacctggttagttgctttcgggatactttgctccgggttatcagcttctgctgcggtgatccccaccagttccagaccaccgaaagagaacatgataatcgccatcatcatcaccagaccggtgaagccgtgtggcaggaaaccaccctgatcccacaggttgctaacgctcgcctgcgggccgccgttgccgctgaatagcagccaggcgccgaagatgatcatcgctaccaccgcgataactttgataatggcaaaccagaactccatctcgccaaacacttttacgtttgtcaggttgatggcgttgatcaccacaaagaacacggcggcagaaacccaggttgggatttccggataccagaactgaatgtatttacccacggcagtcagctctgccatggcaactaaaacgtacagtacccagtagttccagccagaggcgaaaccggcaaaactgccccagtatttataagcaaagtggctaaaggagcctgcgacaggttcttcgaccaccatttcacctagctgacgcatgatcagaaaggcgataaaaccagcaatggcgtaacccaggataatccctggccctgcggattgtattacggaggcgctacccaggaatagccctgtccctatcgcgccacccagcgcgataagctgaatatggcggtttttaaggccgcgctttagctgctcgccgtgctgttgaccttccattatgaaacctcgtgttgtgttgtttttttgaactacgcagcaatgcgtgtgtaattttgtaattccgtttgttgtattggtttctttacattttatgtaactgaattatgatgatagtactttcaactatcacaagataatggtatatgcgcgagaatgcacctgctttatgtagatgtgttgattttctggataaaaaaaaagcaattgtaagtttttcatcacatttaatagatactttaagtctgataacatactgttttaactagctatatgtcggatttgtctgcctgctgaacaccatgccttagccaccagcacaataatcttacaaaaggtcatataagaataaatagatgttaataatacaatggggttgtaacgcgagtatttaaatataatattgcgagctaagtgaaaacgttaagtaattgaaataatttttcattaaaagcgtttcttattgatcgagaaataagttttctatttaatgcaaaaaagttaaggataaacgggaatgaaataaagtgggcgatattgtttacctgagaataatcggtgagaagcagggcgatatttcttcaggctgtgggacgtatgcgtcggttggtaatcgctggcaggttggccatgaagatgaaatttttgcctttgcactcaccaacgccattaccagtactggtaaaggcgttaatctacaggggctacaattttgcaaactcattgataaaagctcaccgctactgtctaatgccatcaatcagaatgagcggttatttattgaaatcgatttgtatcgtataaataaaagcgggcgctgggaacggtattattatattcagctaagaaatgcttcattaactgctattcatgtaaacatttctgacaataatcttcctaccgaatgtgtaaatgttaattatgactacatattatgcaaacatctaatagccaatacggaatttgactggttggcctttcctgctggctataatagcttatttattccacctaaaaacccacctgccagtaatcttaaccctgagccgctaccagttgttaaccttccactctctccaccagcggttaaaccggtctatgccaaatcctgtctgaaggagaagggatgtacagatgccggaacggcagaagaacccgctgaaaacttcgggcaagtagcgatttttgctctgccagtggttgatgactgctgtggataccaccatccggaggctaacgatgttgggcaacccgcagaagctcaaaccatgctactgtttccgggtagtgtgttggcggctcaaatatggggaaaatggtcgctcagtggcatactcagtgcaacccgcggctcttacatcggtgcgttggcatctgctttgtatattccctctgcgggcgagggcagtgctcgtgtgcctggacgtgatgagttctggtatgaggaagaactgcgccagaaagcgcttgcaggcagtaccgccactacccgggtgcgttttttctggggaactgacattcacagcaagccccaggtatatggtgttcatacgggtgaaggtacgccgtatgaaaacgtccgcgtggcgaacatgctgtggaacgaggagaggcagcgttatgaatttacccccgctcacgatgtcgatggccccctgattacctggacgccggaaaatccggaacatgggaatgttccgggccataccggtaacgacaggccgccgctggatcagcccaccattctggtgacgccgattccggacggcaccgatacctataccacgccgccattcccggttcctgatccgaaagaattcaacgattatattctggtttttccggcgggatccggtattaagcccatctatgtttacctgaaggaggatccgcgaaagctgcctggtgttgtaacagggcgcggcgtcctgctttcaccaggaactcgctggctggatatgtcggtatccaataacggcaacggcgcaccaatcccggcgcatattgctgataaattgcgcggacgggagtttaaaacctttgatgagtttcgcgaggcgctgtggctggaggtgagtaaagactcagtgttattggcgcagtttataaaaagtaatcagaataacgttagtcaaggatattccccctatgtccctgaggaggggtattattacggaccaaatgagatagttaagaaattccagatacatcatgtagttgctatagaacatggtggtggagtgtatgatattgataattttaagattgttacgccccgactacatgatgaaattcactacaggagataatgtatatgcgtgatttaaaagataaaatatatttttacacagaaggtgaatttcttgaaatgcttgaggagatagtaaatgcaactagcaaagataaatccctaaaagggaaaaaattagaaaaatatctcgataccttagtggatcatttcattaaaattactgaacatcctaaaaagggagatctcattttctatcctaattcccaagaagatggtgaacctgaaaacatcctgaaaatcgtcaaagaatggcggcgttcacaggggctacccttgtttaaagactctaaataaagtagataataaaactatatatgaaacatcatcgcgtctggctaatgcgatgatgttaataacataaaataataatgtggttgctcttaaaaaacaggtaaaaaatactgaaatcattttatcaatttctcgcgttcaccgataccctttggctggaggtgagtcagtatccggagttgatagcgcagttttcaagtggtaaccaaacacgtataaaacaaggattaaccgcaaaagcacctcttgaaggttggcattatggccctaaagaaatcgttaaaaaattccagatacatcatcgtgttgcaattgaatatggcggcagcgtatacgatattgataatttacgaattgttacccccagactacacgatgagattcactacaggagataaatatgtttaaagaaaagctcgaagattataccgaggaggaatttcttaattttttaggcggattgagatcaactatgaaagatggaaagcccttaaaaggtaaggagctagaaatgtactgggattcattagtagatcattttattgaaattacacagcatccgtcagggagcgatctaattttctaccctaaaagtcaaggagatgataagcctgaaaacatcctgaaaattgtcaaagaatggcggcgttcacaggggctacccttgtttaaagactctaaacaaagtagataataaaactatatggaacatcatcgcgtctggctaatgcgatgatgttaataacataaaataataatgtgggtgctcttaaaaaacaggtaaaatactgaaatctcattaggttattttatcaatttcccgctttcaccgataccctttggctggaggtgagtcagtatccggagttgatagcgcagttttcaagtggtaatcaaacacgtataaaacaaggattaatcgcaaaagcacctcttgaaggttggcattatggccctaaagaaatcgttaaaaaattccacatgtatcattgtgttgcgattgaatatagtggcgaaatttacgatattgataatttaaggagggcacacctcatttgcatgatgaaatttattacaggagatagttaaatgtataattttaaagataaaatagaagattacacagagcgggaattcattgagttgcttggcgagtttacaaatccaaccggggataacgctcaattaaaaggggaagagcttgacaaatattgggatgatctagaagaacatcttaccagaattacacaacatccgttgatgagcgatcttatctactatcctgcaaagaagggagatgataaacctgaaaacatcctgaaaatcgtcaaagaatggcggcgttcgcaaggattgcctttgttcaaagattcagaatgaactctaaacagaatctgtcacctgaaaatcatcacgttctggttaagtgatgattttcgctacgagaaggttacggtggcgattgcagtgataataagcaatgtaaaaagaaaacataggtaaatactacctttctctccttccctgaacattcattttacatattaattcacataattgaattgttatgcgttttgttgcttggtgaatcggttcagaggaaatattttttcgtttcaattctgttaaggtcaccccttggtgggtaaatttaacatttgtgcatagttacagctttgaaacgttatatatgtcaagttgttaaaatgtgcacagtttcatgatttcaatcaaaacctgtatggacataaggtgaatactttgttactttagcgtcacagacatgaaattggtaagaccaattgacttcggcaagtggcttaagacaggaactcatggcctacagcaaaatccgccaaccaaaactctccgatgtgattgagcagcaactggagtttttgatcctcgaaggcactctccgcccgggcgaaaaactcccaccggaacgcgaactggcaaaacagtttgacgtctcccgtccctcattgcgtgaggcgattcaacgtctcgaagcgaagggcttgttgcttcgtcgccagggtggcggcacttttgtccagagcagcctatggcaaagcttcagcgatccgctggtggagctgctctccgaccatcctgaatcacagtatgacttgctcgaaacacgacacgccctggaaggtatcgccgcttattacgccgcgctgcgtagtaccgatgaagacaaggaacgcatccgtgaactccaccacgccatagagctggcgcagcagtctggcgatctggacgcggaatcaaatgccgtactccagtatcagattgccgtcaccgaagcggcccacaatgtggttctgcttcatctgctaaggtgtatggagccgatgttggctcagaatgtccgccagaacttcgaattgctctattcgcgtcgcgagatgctgccgctggtgagtagtcaccgcacccgcatatttgaagcgattatggccggtaagccggaagaagcgcgcgaagcatcgcatcgccatctggcctttatcgaagaaattttgctcgacagaagccgtgaagagagccgccgtgagcgttctctgcgtcgtctggagcaacgaaagaattagtgatttttctggtaaaaattatccagaagatgttgtaaatcaagcgcatataaaagcgcggcaactaaacgtagaacctgtcttattgagctttccggcgagagttcaatgggacaggttccagaaaactcaacgttattagatagataaggaataacccatgtcagaacgtttcccaaatgacgtggatccgatcgaaactcgcgactggctccaggcgatcgaatcggtcatccgtgaagaaggtgttgagcgtgctcagtatctgatcgaccaactgcttgctgaagcccgcaaaggcggagtcaacgtagctgcaggcaccggtatcagcaactacatcaacaccatccccgttgaagaacaaccggagtatccgggtaatctggaactggaacgccgtattcgttcagctatccgctggaacgccatcatgacggtgctgcgtgcgtcgaaaaaagacctcgaactgggcggccacatggcgtccttccagtcttccgcaaccatttatgatgtgtgctttaaccacttcttccgtgcacgcaacgagcaggatggcggcgacctggtttacttccagggccacatctccccgggcgtgtacgctcgtgctttcctggaaggtcgtctgactcaggagcagctggataacttccgtcaggaagttcacggcaatggcctctcttcctatccgcacccgaaactgatgccggaattctggcagttcccgaccgtatctatgggtctgggtccgattggtgctatttaccaggctaaattcctgaaatatctggaacaccgtggcctgaaagatacctctaaacaaaccgtttacgcgttcctcggcgacggtgaaatggacgaaccggaatccaaaggtgcgatcaccatcgctacccgtgaaaaactggataatctggtcttcgttatcaactgtaacctgcagcgtcttgacggcccggtcaccggtaacggcaagatcatcaacgaactggaaggcatcttcgaaggtgctggctggaacgtgatcaaagtgatgtggggtagccgttgggacgaactgctgcgtaaagataccagcggtaaactgatccagctgatgaacgaaaccgttgacggcgattaccagaccttcaaatcgaaagatggtgcgtatgttcgcgaacacttcttcggtaaatatcctgaaaccgcagcactggttgcagactggactgacgagcagatctgggcactgaaccgtggtggtcacgatccgaagaaaatctacgctgcattcaagaaagcgcaggaaaccaaaggcaaagcgacggtaatccttgctcataccattaaaggttatggcatgggcgacgcggctgaaggtaaaaacatcgcgcaccaggttaagaaaatgaacatggacggcgtgcgtcatatccgcgaccgtttcaatgtgccggtgtctgatgcagatatcgaaaaactgccgtacatcaccttcccggaaggttctgaagagcatacctatctgcacgctcagcgtcagaaactgcacggttatctgccaagccgtcagccgaacttcaccgagaagcttgagctgccgagcctgcaagacttcggcgcgctgctggaagagcagagcaaagagatctctaccactatcgctttcgttcgtgccctgaacgtaatgctgaagaacaagtcgatcaaagacaggctggtaccgatcatcgccgacgaagcgcgtactttcggtatggaaggtctgttccgtcagattggtatttacagcccgaacggtcagcagtacaccccgcaggaccgcgagcaggttgcttactataaagaagacgagaaaggtcagattctgcaggaagggatcaacgagctgggcgcaggttgttcctggctggcagcggcgacctcttacagcaccaacaatctgccgatgatcccgttctacatctattactcgatgttcggtttccagcgtatcggcgatctgtgctgggcggctggcgaccagcaagcgcgtggcttcctgatcggcggtacttccggtcgtaccaccctgaacggcgaaggtctgcagcacgaagatggtcacagccatattcagtcgctgactatcccgaactgtatctcttacgacccggcttacgcttacgaagttgctgtcatcatgcatgacggtctggagcgtatgtacggtgaaaaacaagagaacgtttactactacatcactacgctgaacgaaaactaccatatgccggcaatgccggaaggtgctgaggaaggtatccgtaaaggtatctacaaactcgaaacccttgaaggtagcaaaggtaaagttcagctgctgggctccggttctatcctgcgtcacgtccgtgaagcggcagagatcctggcgaaagattacggcgtaggttctgacgtttatagcgtgacttccttcaccgaactggcgcgtgatggtcaggattgtgaacgctggaacatgctgcacccgctggaaactccgcgcgttccgtatatcgctcaggtgatgaacgacgctccggcagtggcatctaccgactatatgaaactgttcgctgagcaggtccgtacttacgtaccggctgacgactaccgcgtactgggtactgatggcttcggtcgttccgacagccgtgagaacctgcgtcaccactttgaagttgatgcttcttatgtcgtggttgcggcgctgggcgaactggctaaacgtggcgaaatcgataagaaagtggttgctgacgcaatcgccaaattcaacatcgatgcagataaagttaacccgcgtctggcgtaagaggtaaaagaataatggctatcgaaatcaaagtaccggacatcggggctgatgaagttgaaatcaccgagatcctggtcaaagtgggcgacaaagttgaagccgaacagtcgctgatcaccgtagaaggcgacaaagcctctatggaagtaccatctccgcaggcgggtatcgttaaagagatcaaagtctctgttggcgataaaacccagaccggcgcactgattatgattttcgattccgccgatggtgcagcagacgctgcacctgctcaggcagaagagaagaaagaagccgctccggcagcagcacccgcggctgcagcggcaaaagacgttaacgttccggatatcggcagcgacgaagttgaagtgaccgaaatcctggtgaaagttggcgataaagttgaagctgaacagtcgctgatcaccgtagaaggcgacaaggcttctatggaagttccggcaccgtttgctggcaccgtgaaagagatcaaagtgaacgtgggtgacaaagtgtctaccggctcgctgattatgatcttcgaagtcgcgggtgaagctggcgcggcagctccggcggctaaacaggaagcggctccggcagcggcccctgcatcagcggctggcgtgaaagaagttaacgttccggatatcggtggtgacgaagttgaagtgaccgaagtgatggtgaaagtgggcgacaaagttgccgctgaacagtcactgatcaccgtagaaggcgataaagcttctatggaagttccggctccgtttgcaggcgtcgtgaaggaactgaaagtcaacgttggcgataaagtgaaaactggttcgctgattatgatcttcgaagttgaaggcgcagcgcctgcggcagctcctgcgaaacaggaagcggcagcgccggctccggcagcaaaagctgaagccccggcagcagctccggctgcaaaagccgaaggcaaatctgaatttgctgaaaatgacgcttacgttcacgcgactccgctgatccgccgtctggcacgcgagtttggcgttaacctggcgaaagtgaagggcaccggccgtaaaggtcgtatcctgcgcgaagacgttcaggcttacgtgaaagaagctatcaaacgtgcagaagcagctccggcggcaactggcggtggtatccctggcatgctgccgtggccgaaggtggacttcagcaagtttggtgaaatcgaagaagtggaactgggccgcatccagaaaatctctggtgcgaacctgagccgtaactgggtgatgatcccgcatgttactcacttcgacaaaaccgatatcaccgagctggaagcgttccgtaaacagcagaacgaagaagcggcgaaacgtaagctggatgtgaagatcaccccggttgtcttcatcatgaaagccgttgctgcagctcttgagcagatgcctcgcttcaacagttcgctgtcggaagacggtcagcgtctgaccctgaagaaatacatcaacatcggtgtggcggtggataccccgaacggtctggttgtcccggtattcaaagacgtcaacaagaaaggcatcatcgagctgtctcgcgagctgatgactatttctaagaaagcgcgtgacggtaagctgacagcgggcgaaatgcagggcggttgcttcaccatctccagcatcggcggcctgggtactacccacttcgcgccgattgtgaacgcgccggaagtggctatcctcggcgtttccaagtccgcgatggagccggtgtggaatggtaaagagttcgtgccgcgtctgatgctgccgatttctctctccttcgaccaccgcgtgatcgacggtgctgatggtgcccgtttcattaccatcattaacaacacgctgtctgacattcgccgtctggtgatgtaaataaaagagccggcccaacggccggcttttttctggtaatctcatgaatgtattgagattattagcgaatagacaaatcggttgccgtttgttgtttaaaagttgttaacaattttgtaaaataccgacggatagaacgacccggtggataatgggcgtcataaaaaaaacgtcagacccgccggagataaatatatagaggtcatgatgagtactgaaatcaaaactcaggtcgtggtacttggggcaggccccgcaggttactccgctgccttccgttgcgctgatttaggtctggaaaccgtaatcgtagaacgttacaacactcttggcggtgtttgcctgaacgtcggctgtatcccttctaaagcactgctgcacgtagcaaaagttatcgaagaagccaaagcgctggctgaacacggtatcgtcttcggcgaaccgaaaaccgatatcgacaagattcgtacctggaaagagaaagtaatcaatcagctgaccggtggtctggctggtatggcgaaaggccgcaaagtcaaagtggtcaacggtctgggtaaatttaccggggctaacaccctggaagttgaaggtgagaacggtaaaaccgtgatcaacttcgacaacgcgatcattgcagcgggttctcgcccgattcaactgccgtttattccgcatgaagatccgcgtatctgggactccactgacgcgctggaactgaaagaagtaccagaacgcctgctggtaatgggtggcggtatcatcggtctggaaatgggcaccgtataccacgcgctgggttcacagattgacgtggttgaaatgttcgaccaggtcatcccggcagctgataaagacatcgttaaagtctttaccaagcgtatcagcaagaaattcaacctgatgctggaaaccaaagttaccgccgttgaagcgaaagaagacggcatttatgtgacgatggaaggcaaaaaagcacccgctgaaccgcagcgttacgacgccgtgctggtagcgattggtcgtgtgccgaacggtaaaaacctcgacgcaggcaaagctggcgtggaagttgacgaccgtggtttcatccgcgttgacaaacagctgcgtaccaacgtaccgcacatctttgctatcggcgatatcgtcggtcagccgatgctggcacacaaaggtgttcacgaaggtcacgttgccgctgaagttatcgccggtaagaaacactacttcgatccgaaagttatcccgtccatcgcctataccgaaccagaagttgcatgggtaggtctgactgagaaagaagcgaaagagaaaggcatcagctatgaaaccgccaccttcccgtgggctgcttctggtcgtgctatcgcttccgactgcgcagacggtatgaccaagctgattttcgacaaagaatctcaccgtgtgatcggtggtgcaattgtcggtactaacggtggtgagctgctgggtgaaatcggcctggcaatcgaaatgggttgtgacgctgaagacatcgcactgaccatccatgcgcacccgactctgcacgagtctgtgggcctggcggcagaagtgttcgaaggtagcattaccgacctgccgaacccgaaagcgaagaagaagtaatttttcgtttgccggaacatccggcaaattaagaagcggctattctggccgcttcagattgttgataaagtgctcgtggttgatgccggatgcggcgtaaacgccttatccgacctacaaaatcatgcaaattcaatatattgcatggcttgtgtaggcccgataagcttgcgcatcgggcgattcgatgtttgtcatcagtcttaagcggctaacaacgccgcttttttacgcctgcaatttacctttccagtctccttgctccacgctcagacaaccgttcgcgtaccgctgaccgttgctcattattcaatcgggcagtatggttactgtcgtttagacgctgcgggcggctctcctgaactttctctcgaaaaacctgacgctgctcaggcgaggcagactggatacgctgacgtgctgcatctctttgctgttgattctgcgggttagtctgcattttctcgcgaaccgcctggcgctgctcaggcgacgcggactgaatacgctgacgtgccgcctctcttcgctgctggttctgtgggttagtctgcattttctcgcgagccgcctggcgctgctcaggagaagccgactgataacgctgacgagcggcgtccttttgttgctgggtcagtggctggcgacggctgaagtcgcggaagtcgtcatagctcccatagtgttcagcttcattaaaccgctgtgccgctgcctgacgttgggtatctcgcgtaatgacgggggcggcgtgtgttcgttgctgaaactggcttgctgccgcctgacgctggctgtcgcgtgttggagcaggtagcggcgtggcgctcattccgcctttaacatcggtttggtgaaaccgctttgccatatcctgatcatgataaggcataccatcgcggtaattcggattgtgccgccatgccatattcttatcagtaagatgctcaccggtgatacggttgaaattgttgacgtcgatattgatgttgtcgccgttgtgttgccagtcattaccgtcacgatgaccgccatcgtggtgatgataatcatcatcgtcatgatgatgatggtcatgatcgtcatgatgatgatggtcatgatcgtcgtcgtcccagtcgatgctgctgaatagtgcgtatgtggtagcaacgcccatgctatagccgaatccgcgcacaaagctgtcaacaaacggttctccggctggcggcggcagataaactggcggataagcggtattggcccaactgccgtaaaccacgtttgggttgtagttcggaatataaaccacatccggattggctggctcaatggctattactgtcggtgcaggttctgcgacgacggggctggacgtagaaacggtatttgattgtgtggcaggggcgttggcgggctgatttaccggtacgacttttttcgttgtcgtgatgatcttttgttccgttgatgacttcagcgagccggtttgttgcgccagttgccgcaatcgctgtaccgagtccatcacgtcttgcggctgcgccagaaaagcatcgcccaggttttgcacccattgcgggttttcgcccatcaatgccatcaattgtggaaaggccaccagtgatttaacgctggcgtcccacggctggtcagataccgcctgaatagcagcatcgccttgtttaagtgggttatcgtgcgaccattgtactgcttgcgcaacgtttgtcggataggttgatgccatcagcacctgcgaaagtagggcgtcggggtatagcgcgacaggtgcaacccattgatctatttgagcagtgctgaatgcggatttgacgacggcaggtgttacaggaggcacggaaaccgttgcaggaagcgtaactgcggagatgtcaggcgcagtctgttgtgtcgattgcgcttccacaggcgcttccactgtgcggctttttatatatagcccggcagaggcggcacaaagcccggcactgcaaattagcgccagcacatggggtttaaacggcaaagtcattttcataattcggatctcaaggaaatcgcaatggtcggcgaactgccacccgcaggtgctgtgaatccgagtataaagaggcggtagtttaaattttgactaatcttgggattcgttgaggaaggtgattatcaccatgcgaattaacgaagtttttacggagggaaacaatctctagaccatccttaacgattcagccacttttttatgttgcttttttgtaaacagattaacacatcgtcaaaatcctgctattctgcccgttgcggtactgggcatttaccctacaaactgctgtctcacaggagcgtgaagagaatcgcctgccgcactatgacaatgagagcgaggagaaccgtcgtgctagaagaataccgtaagcacgtagctgagcgtgccgctgaggggattgcgcccaaacccctggatgcaaaccaaatggccgcacttgtagagctgctgaaaaacccgcccgcgggcgaagaagaattcctgttagatctgttaaccaaccgtgttccccctggcgtcgatgaagccgcctatgtcaaagcaggcttcctggctgctgtcgccaaaggcgaagctaaatccccgctgctgactccggaaaaagccattgaactgctgggcactatgcagggtggttacaacattcatccgctgatcgacgcgctggatgatgccaaactggcaccgatcgctgccaaagcactttctcacacgctgctgatgttcgataacttctatgacgtagaagagaaagccaaagcaggcaacgaatatgcgaagcaggtaatgcagtcctgggcggatgccgaatggttcctgaatcgcccggcgctggctgaaaaactgaccgttaccgtcttcaaagtcactggcgaaaccaacaccgatgacctctctccggcaccagatgcgtggtcacgcccggatatcccactgcacgcgctggcgatgctgaaaaacgcccgtgaaggtattgagccagatcagcctggtgttgttggcccgatcaaacagattgaagctctgcaacagaaaggtttcccgctggcgtacgtcggtgacgttgtgggtacgggttcatcgcgtaaatccgccacgaactccgttctgtggtttatgggcgatgatattccacatgtgccgaacaaacgcggcggtggtttgtgcctcggcggtaaaattgcaccaatcttttttaacacgatggaagacgcgggtgcactgccaatcgaagtcgacgtctctaacctgaacatgggcgacgtaattgacgtttacccgtacaaaggtgaagtgcgtaaccacgaaaccggcgaactgctggcaaccttcgaactgaaaaccgacgtgctgattgatgaagtgcgtgctggcggccgtattccgctgattatcgggcgtggcctgaccaccaaagcgcgtgaagcacttggcctgccgcacagcgatgtgttccgtcaggcgaaagatgtcgctgagagcgatcgcggcttctcgctggcgcagaaaatggtaggccgtgcctgtggcgtgaaaggcattcgtccgggcgcgtactgtgaaccgaaaatgacttctgtaggttcccaggacaccaccggcccgatgacccgtgatgaactgaaagacctggcgtgcctgggcttctcggctgacctggtgatgcagtctttctgccacaccgcggcatatccgaagccagttgacgtgaacacgcaccacacgctgccggacttcattatgaaccgtggcggtgtgtcgctgcgtccgggggacggcgtcattcactcctggctgaaccgtatgctgctgccggataccgtcggtaccggtggtgactcccatacccgtttcccgatcggtatctctttcccggcgggttctggtctggtggcatttgcagccgcaacaggcgtaatgccgctggatatgccggaatccgttctggtacgcttcaaaggcaaaatgcagccgggtatcaccctgcgcgatctggtacacgccattccgctgtatgcaatcaaacaaggtctgctgaccgttgagaagaaaggtaagaaaaacatcttctctggccgcattctggaaattgaaggtctgccggatctgaaagttgagcaggcatttgagctgacagatgcgtctgccgagcgttctgctgccggttgtaccatcaagctgaacaaagaaccgatcattgaatacctgaactctaacatcgtcctgctgaagtggatgatcgcggaaggttacggcgatcgtcgtaccctggagcgtcgtattcagggcatggaaaaatggctggcgaatcctgagctgctggaagccgatgcagatgcggaatacgcggcagtgatcgacatcgatctggcggatatcaaagagccaatcctctgtgcaccgaatgacccggacgacgcacgtccgctgtctgcggtacagggcgagaagattgacgaagtatttatcggttcttgcatgactaacatcggtcacttccgtgccgctggtaaactgctggatgcgcacaaaggtcagttgccgacccgcctgtgggtggcaccgccaacgcgtatggacgctgcgcagctgaccgaagaaggctactacagcgtcttcggtaagagtggtgctcgtatcgagatccctggctgttccctgtgtatgggtaaccaggcgcgtgtagcagacggtgcgacggtggtttccacctctacccgtaacttcccgaaccgtttgggtactggcgcgaatgtcttcctggcttctgcggaactggctgctgttgcggcgctgattggcaaactgccgacgccggaagagtaccagacctacgtggcgcaggtagataaaacagccgttgatacttaccgttatctgaacttcgaccagctttctcagtacaccgaaaaagcggacggggtgattttccagactgcggtttaataagtaagcgcacgcgctgcgcataaacgacacaatgcccggtgaatgagattcccgggcattttttatttctaaaccatcgccgttccgctgtttttctccggtaaggctgcgataattacatcaatggcgcaatgcgatttcggcgcattgccgggagcagaggaacacactatggattacgaatttctgcgcgatattaccggagtggtaaaggtgcgcatgtccatggggcatgaagtggtcgggcactggtttaatgaagaggtgaaagaaaacctggccttgcttgatgaagtggaagacgcagcgcgcacgctcaaaggcagcgaacgatcctggcagcgggcagggcatgaatacactctgtggatggacggtgaagaggtgatggttcgcgccaatcaactggaattcgctggcgatgaaatggaagaggggatgaactactacgatgaagagagcttgtcgctgtgcggcgttgaggattttcttcaggtggttgcggcttaccgtaatttcgtgcagcagaagtaagtaaatcaggcggagcctccgtgctccgcctgagacgttaaacagcgggcatattgcgcccgtaataaatctcgcgcatttctttccacagcgcagcggtaatttcctggcgctcgctgtcggttaaatcttccggtttggtgtggaacatgtagtgcttaaggtcgaactctttaagcaacatcttggtatggaagatattctcctgatagacgtttacatccaccatgtcatacagcgccttcatatcttcggacataaagttctgaatcgaattaatctcatggtcgataaagtgcttcataccgttaatgtcgcgggtaaaaccgcgcacgcgataatcaatagtcacaatatcggactcaagctggtggatcaggtaattcagcgccttcagcggagaaatcacgccgcaggtagagacttcaatatcggcgcggaaggtacataaaccgccttcaggatgactttccgggtaggtatgtacgcaaatatgacttttatcgagatgggcaacgaccgtttctggcagtgggccggggtgttctgttttgtcgataagtttcgggtcgaccggttcttcactcaccagaatagtgacgctggcaccttgtggctcgtaatcctggcgggcgatgttaagaatattggccccgataatggaacaggtttctgacaggatttcggtcagacggttggcattatagagttcatcgatataagcaatataaccgtcgcgctcttcggtagttttggcgtagcagatatcgtaaatacaaaaactcagacttttggtcagattattaaagccatgcagtttcagttttttcaatttcttatcttctccttaggacggctgtgaagccagtgcatcttgcagatactggggtaaggcaaaagctgccgtatggactgccggattgtaataacggcatttcaggccagaagcgagaaaacgcgcctgaataatttcggttgagagatggcgtaaggcgtcgttatctgtcgcccatgcaaaggtcatgatgccgccgtaataggtcgggatcgccgcctgataaaagccaacatcgctgaagtaatggctgagtttgcgatggctgtcgatggcctcttcctgctgtaaaaagcagacgccgttttgtgcgacgaagataccgccaggattcaggcaacgtttgcagccttcataaaatgcagaagtaaacagactttcgccgggaccgataggatcggtgcagtcggagataatgacatcaaaggtctggctggtttgattaacgaaattgacaccatcgtcgatcaccagtttaaagcgcggatcgtcgtaactaccggcgttatggttgggaagatactgacggcagaacgacacgacacccgcatcgatttccaccatcgtgattgactcaacgtttttatgtcgggttacttcacgcagcatggcaccgtcgccgccgccgataatcagcacatgtttcgcgtggccgtgggccagtagcggaacatgggtcatcatctcatgatagataaactcgtcacgctcggtggtttgtactacaccatccagcgccattacgcgaccaaatgcggcgttctcaaaaatgatcagatcctggtgatcggtcttttcatgatacagaacgttatctaccgcaaagtactgcccaaactggtcgtgtagcgtttcatgccactgttttttttcggccatgggttgatacctcctttgttaacacccgtaaaaaaatggcgcaacataatagctaacattgaccgcggatgcacggtcaatatttctacaaaaaggtatcagggattatttgacgtaggcaagcaggcttaaggaatcgcgggccagggctttgcactttttagcgacgggaatgccaatgccgctgagatcgcggtagctgtcttcaccgagggctttcatgtcgaaggtgtcgtaattactgagatcccactggttttgctgggcgaaaaagaccagcgcgcgacgaatttgcccgttaggtaagttctggtaaccacaatcgttcttcagaaaaacaaaaactgccgttaaatcggccatatcttcggcttcagactcgctgagcgcgtaactgtttgcgcaaacggccatcaggctgccgaataacactgttctgaaaaacgtcttcattgcttctaccaggggcttaaagaagataaacgttagcacactgcgagcgaggcgacgaccattattgtcgattaaattgtgtctgcggcttgaccttcccgtaaggggaaggactatgctcaacgtttgattttgtttcgcctgcttaagaataaggaaataactatgcaacgtcgtgatttcttgaaatattccgtcgcgctgggtgtggcttcagccttgccgctgtggagccgcgcagtatttgcggcggaacgcccaacgttaccgatccctgatttgctcacgaccgatgcccgtaatcgcattcagttaactattggcgcaggtcagtccacctttggcgggaaaaccgcaactacctggggctataacggcaatctgctggggccggcggtgaaattacagcgtggcaaagcggtaacggttgatatctacaaccaactgacggaagagacgacgttgcactggcacgggctggaagtaccgggtgaagtggacggcggcccgcagggaattattccgtcaggtggcaagcgctcggtgacgttgaacgttgatcaacctgccgctacctgctggttccatccacatcaacatggcaagaccgggcgacaggtggcgatggggctggctggtttggttgtgattgaagatgacgagatcctgaaattaatgctgccaaaacagtggggtattgatgatgtcccggtgattgttcaggataaaaaatttaacgctgacgggcagattgattatcaactggatgtgatgaccgccgctgtgggttggtttggcgatacgttgctgaccaacggtgcaatctacccgcaacacgctgccccgcgtggctggctgcgcctgcgtttgctcaatggctgtaatgcccgctcgctcaatttcgccaccagcgacaatcgcccgctttatgtgattgccagcgacggcggtctgctacctgaaccggtgaaggtgaacgagctgccagtgctgatgggcgagcgttttgaagtgctggtggaggttaacgacaacaaaccctttgacctggtgacgctgccggtcagccagatggggatggcgattgcgccgtttgacaagccgcatccggtaatgcggattcagccgattgccattagtgcctctggtgctttgccagacacattaagtagcctgcctgcgttaccttcgctggaagggctgacggtacgcaagctgcaactttctatggacccaatgctcgatatgatggggatgcagatgctgatggagaaatatggcgatcaggcgatggccgggatggatcacagccagatgatgggccatatggggcacggcaatatgaatcatatgaaccacagcgggaagttcgatttccaccatgccaacaaaatcaacggtcaggcgtttgatatgaataagccgatgtttgcggcggcgaaagggcagtacgaacgttgggttatctctggcgtgggcgacatgatgctgcatccgttccatatccacggtacgcagttccgtatcttgtcagaaaatggcaaaccgccagcgacgcatcgcgcaggctggaaagataccgttaaggtagaaggtaatgtcagcgaagtgctggtgaagtttaatcacgatgcaccgaaagaacatgcttatatggcgcactgccatctgctggagcatgaagatacggggatgatgttagggtttacggtataaaaagaccgtattcggaaatatgcccggatctctccgggcatgaacaaatcgcacgttgtcagcaatctgagcaagccttacttcacatcatccggcagcgcataagccacaatatagtcgcccatcttcgtaccaaatgaaccgtgaccgcctgcggagatcaccacatactgcttgccattcacttcataggtcattggcgtagcctgaccacccgctggtaaacgaccctgccacagtttttcaccgttgctcatgttgtaagcgcgcaggtagttatctgccgtagcggcgataaacagcacgttacccgccgtggagattggcccgccaagcatcggcatacccatattgaacggcaccggtacaggcatcgggaatggcatactgtcctgcggcgtaccaatacgtttcttccacaccacttcattggttttcagatccaatgccgagatatagccccatgctggctgtttacatggcagaccaaacggtgagaggaacgggttgagcgtgacgccatacggtacaccgtactgcggctggatgccggattccgtacccgtgcctttggcatctttcggctgttccatcgggttaccaggaccgcgtgggatcagtttcgaaacaaacggcagtgccattgggttggcaatcgccacttcacgattcggatcaacggaaatcccgccccattcgaacatccccaggttacccgggaagaccagcgtaccctgttcagatggcggcgtgaaaatgccttcatagcgcatctggtggaacatcacgcggcacaccaactggtcaaacatggtggctccccacatatccgcaccgctcaaatctttcgtcggacggaagctcagttccgagaagggttgagtaggggtcacgtaatcgcctttagcagcaccttggggaaccggtttttccggggcaggaaccaccagttcaccattacgacgatcgagcacaaaaatgttgccggttttcgccggagcgtaaataaccggcactttctgaccattaacggtgatgtccgccagcgtcggctgtgccggaagatccatatcccacaggtcgtggtgaacggtctgatagctccacgccagtttcccggtagtggcattcagcgccagaatcgagctggcataacgttcctgttccggtgtgcggttaccaccccagatatctggcgtggtgacgcccatcggcagatagaccagatccagcttcgcgtcataggccgctggtgcccacgagtttggtgagttaaaggtaaaggtgtgttcgtcagacgggatcgcattcggatctttcgcgcccggatcaaaagcccacagcagctccccggtgttgacatcaaaaccacggatcacgccagacgtttcgcgggttgagaagttgtcggtgactgaaccggccatcacgatggttttatcggtgataatcggcggcgaagtcggttcatacagacccggtttggtgtccggcatattgctttgcagattgagcacgcctttattggcgaaggtttcgcacagcttgccgttttcagcgttaattgcaatcagacgaccatcattgaccggaagaatgatacgacgcgggcaatccgccatcacttccggcgaagcagtttctgctttggcttcatgataagagacgccacggcaggttacatgctggaaggactcgttggttttcagctcaggatcgtaatgccatttctctttaccgctggcggcatccagcgcaaacagacgttgatgcgcggtacacaggtaaagggtgtcgcccactttaattggcgtcacttcattggtgatttcgcccggatcgttcggctgcttcacatcgccagtacggaacacccaggcttctttcagcttgtggacgttatcagcgttaatttgcttcagtggtgaaaagcgttgaccttcctgattgcgaccataggcaggccagtcctgatcggcaacgggggagatggcttctgctggcgtggtatcggcgcttaaggtgccgctgatttcctgcggatcgttaaatccggcccaggtcaggataccaccgctaatcagcagtgcgaccaccagtgcggcaactgcgccgctggcaggaatgaccaggcgacgccagacaaacggcaggatcagccagatgccgaagaagaccagaatgtcgctgcgcggagtcagcgcccagaagtcgaaaccaacttcccagacgccccaaatcatagtgccgagcagcagggctgcgtacagccaaagcgcggcgcgtttactgcgccacagcatccaggcgacgccgagcatcacaaggccagcgatagggtagtaccaggagccgccaatcgcgaccagccagcctccgccaatgagtagatacagcccgcaaagcgctgcaaaaagggctgttagcgtgacgagtaatcgccgcgagccggtattgttaattgccataaagagacaccatttcaattcattaatattttagtagcaattaattataggttttaacatgtgtgatcgtcatcacaattcgagctttattaacagattccgcgaatgaatagttttactggtatactgcgtgtcttgcgctttgttgcggtgctgaaacctgcccgtgcgaagtgatttgtttttaaatcatatggttatagatatgaaacatactgtagaagtaatgatccccgaagcggagattaaagcgcgtatcgccgaactgggtcgtcagattactgagcgttacaaagacagcggcagcgatatggtgctggtgggtctgctgcgtggctcatttatgtttatggcggacctgtgccgtgaagttcaggtatctcatgaagtcgactttatgaccgcctccagctacggtagcggcatgtccaccacccgtgatgtgaaaatcctcaaagatctggatgaagatatccgtggcaaggacgtgctgattgttgaagatatcatcgactcggggaatacactgtcgaaagtgcgtgagatcttaagcctgcgcgaaccgaagtcgttggcgatttgtacgctgctggataaaccgtcccgtcgtgaagtgaacgtcccggtagaatttatcggtttctcgatcccggatgagtttgtggtgggttacggcattgattacgcacagcgttaccgtcatctgccgtatatcggcaaagtgattctgctggacgagtaagtgtgaagttgccggatgtgttgcatccggcatggcgaatttatttgtgattgatgtgcttcagcttgaggttggagatcccgtgacggtaacgttgctcaagggtttcgcggttagtcgctgtgacatccagatcacgcagcaagccgtcgtgaatgccgtaggcccagccgtgaatggtaactttctgcccgcgtttccacgctgattgcataatggtggagtggcccaggttatacacctgttccatgacgttcagttcacacaaggtatccagacggcgctcttgcggcatttcgccgagcaatgagctatgtttgaaccagatatcgcggatatgcagcagccagttgttgataagccccagttccgggttttcaactgcggcttgtacgccgccgcaaccgtagtggccacagataataatgtgttcaacttcgagtacatccactgcatactgaaccacggaaaggcagttcaggtcggtgtgaatgaccaggttagcaacattacggtgaacaaagagttcgcccggctcaagaccggttaaacgttctgcaggaacgcgactgtcggaacatccaatccatagaaagcgcggtttttgcgcttgtgccagtttctcaaaaaacccgggatcctcttccaccagcatttttgaccatagtgcattgttgctgatgagtgtatctatgtctttcatggaggttaacgacctgtaaccaaataattacgtttggctaatatagggcaactccgggacgatttaaaccacagataaagtgtaagaacgtaaggtaagtaaaaatttatgaccattgcactggaacttcaacagcttaaaaaaacctatccaggcggcgttcaggcgcttcgtggaatcgatttgcaggtcgaagcgggtgatttttatgcgcttctcgggccgaacggggccggaaaatcgaccactatcggtattatcagctctctggtaaataaaacctccgggcgggtcagcgtatttggttacgatctcgagaaagatgtcgtaaacgctaaacgtcagttgggtctggtgccacaggaatttaacttcaacccgtttgaaaccgtgcagcaaattgtggtgaatcaggcagggtactacggtgtggagcgcaaagaagcgtacattcgcagcgaaaagtatcttaaacaactcgatctatggggaaaacgcaacgaacgtgcgcgtatgttatctggcgggatgaagcgccgtttaatgattgcccgtgcgttaatgcatgaacctaaactactgattctcgacgaaccgaccgcaggcgtggatattgaacttcgccgctcaatgtggggctttttgaaggatttaaacgacaaaggcaccaccatcattctcaccacacactacctggaagaagcagaaatgctgtgccgcaatatcggcattattcaacacggtgagttggtggaaaatacttcgatgaaggcgctgctggcgaagctgaaatcagaaacctttattctcgatctcgcaccgaaaagtccgttaccgaagctcgatggctatcagtatcgactggtagataccgccacgctggaagttgaagtgctgcgtgagcagggcatcaacagcgtatttacgcagttaagtgagcagggcattcaggtattaagtatgcgtaacaaagctaaccgtctggaagagctgtttgtttcactggttaatgaaaaacaaggagatcgcacatgatgcatctttactgggtggcgctaaaaagcatctgggcgaaagagatccatcgctttatgcgtatctgggtgcagacgctggtgccgccagtcatcaccatgaccctttactttattatcttcggtaacctgattggttcgcgtattggcgatatgcatggcttcagctacatgcagttcatcgtaccggggctgatcatgatgtcggtgatcaccaacgcctacgctaacgtcgcgtcatcattttttggtgccaagttccagcgtaatattgaagagctgctggtagcgccggttccgactcatgtcattattgccggatatgtcggtggtggcgtggcgcgtggtctgtttgttggtattttggtgacggcaatttcactgttttttgtgccgtttcaggtgcattcgtgggtattcgttgccttaaccctggtgctcactgcggtgctattctcccttgcgggtttgctgaacggcgtgtttgccaaaacgttcgatgacatcagcctggtgccaacctttgtgttaacgccactcacgtatttgggcggggtgttttactccctgactttgttgccgccgttctggcaagggctgtcgcacctgaacccaatcgtttatatgatcagtggtttccgctacggcttcctcggtatcaatgatgttccgctggtcactacctttggcgtactggtggtctttattgtggcgttttatttgatctgttggtcgctgatccaacgtggacgtggtttgcgtagctaaggctatttcctctcctctggatttgggggagaggagttttgacggctatcaccctttatcaacaatggtcagggtagactgattttcggctaaggaggaaggcgatgttaggttgggtaattacctgtcacgatgaccgggcgcaagagatactggatgcgctggagaaaaaacatggggcacttcttcagtgccgggccgtgaatttctggcgcggattaacctctaatatgctcagccgcatgatgtgcgatgccttgcatgaaacggactctggtgagggcgttatctttttaaccgatatagccggagcgccaccgtaccgcgtggcttcattattaagccacaaacactcccgttgcgaagtgatttctggtgtcacgttaccgttaattgaacagatgatggcttgccgtgaaaccatgaccagttcagcgtttcgcgagcatattgtcgaactgggtgcgccggaggtgagtagtctttggcaccaacaacaaaaaaatccgcctttcgtcctcaaacataatttgtatgagtattaacccgcgattctgatgacgcttttgctacaataaaagcgttgtttcaccctcggttattttttcatgtacaaacaagctgttattctcctgctgatgctgtttaccgcaagcgtcagtgccgcattacctgcccattatatgcaaaccatcgaaaatgccgcggtctgggcgcaaattggtgacaagatggtgacggtggggaatattcgggccggacaaatcattgccgtggagcccactgccgcaagttattacgtatttaattttggctttggtaaagggtttatcgataaaggccatctcgagccggttcaggggcgacaaaaagttgaagatggtttaggtgacctcaacaagccgctgagtaatcagaacttaataacctggaaagatacgccggtttataacgcgccgagtgtgggcagtgcgccatttggagtactggcggacaatttgcgctacccgattttgcataaactgaaagacaggttaaatcaaacctggtatcagatccgcattggcgatcgactggcctatatcagcgcgctggatgcccaacccgataatggcttgccggtgctaacctatcaccatattttgcgcgacgaagaaaacacccgttttcgccatacttcgacgaccacctcggtacgcgctttcaataaccagatggcctggctgcgcgacaggggatacgcgacactgagcatggcgcagctggaaggttacgtgaagaataagatcaatctccctgcgcgagcggtggtaattacctttgatgatggcctcaagtcggtgagccgctatgcgtatcctgtgttgaaacaatatggtatgaaggcgacggcgtttattgttacctcgcgcatcaaacgtcacccgcagaaatggaacccaaaatcgctgcaatttatgagcgtttctgaacttaacgaaattcgcgatgtatttgatttccagtcacatactcattttttgcatcggatagatggttatcggcggcctatattgctgagccgtagtgagcacaatattctgtttgattttgcacgttcacgccgcgctctggcgcaatttaatccacatgttttgtatctttcttatccatttggcggatttaatgacaaagccgtgaaggcagcaaaagaagccggatttcacctggcggtgacgaccatgaaaggcaaagtaaaaccgggggataatccgttgttactaaaacgactttatatcttaagaacggattcgctggagacgatgtcgcggctggtgagtaaccagccgcagggataacaatcaggcaacctgtaccggaatcgctttcgcggtacgtttcatttcgttgtcgccttcaaaataggcgacgttgggtcgccaggtgcgagcttcttcatctggcatggtaacgaagctggcgatgatgacaatatcgccgacgctggcgcagtgggccgccgcaccgttaacagaaataattctcgaaccgcgttctgccgcgatggcataggtggagaaacgcttgccgttggtgacattccagatatcaatggcttcgttttcgagaataccggctgcgtcaagaaaatcctgatcaatggcgcaagaaccttcatagtgcaggtccgcatgagtcactttcacgcggtggagtttgccctgcagcatcgtgcgaatcataacttctacctttctaccctgtcgttaacgaagcaggcgatgcctgctttgaggaaattctcacgcagtattgcccgatttttgtttagtgtctactcatctgacggcatttgcagcagcagtttgcgtaccgtgccgaagcgtgccatgtaacgcctgtaaccaattgaaatttatctgaacgctgctcggtaaacactaaagaggcggctgacgacggcacaccatgactggatactgccttcacgcaagaccacacggaaggcagggaagatggatgcaccgagtaccacaccgcatgatgcggtgtttaaacaatttttaatgcatgcggaaacggctcgcgactttctggatatccatttgccagcggagctacgcgaactgtgtgacctcgacacgctgcatcttgagtcggggagttttattgaagaaagcctgaaagggcacagcactgacgtgctttattccgtgcaaatgcagggcaaccccggttatttgcatgttgtgattgaacatcaaagcaagccggataagaaaatggcctttcgcatgatgcgttattctattgctgccatgcaccggcatctggaggctgaccacgataagctgccgctggtggtgccaattctgttttatcagggcgaggccacaccttatccgctatcaatgtgctggtttgatatgttttactcaccggaactggcgcgacgcgtctataacagtcctttcccgctggtggatatcactatcacaccggatgacgaaatcatgcaacatcggcggattgcgattctcgaactgctgcaaaaacatattcgccagcgcgacttaatgttattgctggagcaactggtcacgctgattgacgaagggtacactagcggaagtcagttagttgccatgcaaaactatatgctgcaacgcggtcatactgaacaagcggatttgttttatggtgtgctgagagacagggaaacgggagggaagtctatgatgacgctggcgcagtggtttgaagagaagggaattgagaagggaattgagaagggaattgagaagggaatggagaaagggattgagaaggggattcagcagggaagacaggaagtaagtcaggaattcgccctgcgtcttctaagtaaaggaatgcctcgggaagacgttgcagagatggcaaatttacctcttgctgagattgataaactgattaactaagttatctgcattatcagttttagccagataattgttattgttaactgaccagataattaagggaacatatggaaataaagacacggagagaaaccaggcagacgttggcgcagtggtttgaagagaagggaaggcaggcggttagacaggaggtaagtcaggaattcgcccaacgttttctgaataaagggatgtctcgggaagacgttgcagaggtgacagctttatctcttgcagagattgataagctaattaactctaactaagttgtctacgatatgaataattgcttacagatgacgtggcaatgaataactggcgccatcagccgtagcgccagttaagtattacgccagttcgaccattttgttgtcgatcaggcgggcatcgccaagccaggcggctaccagaatcactgcacgtttgctgttttcagagacttccagcaatgtgtcggcatcgcgaatctgaatatcatcggcgcggaagcctttttcattcagttcttgcccggcaatagcaataatttcatcgagatcccgttcaccagcctgtaatttatcggcaatcgaacttaaaaccttgtacagaccgggcgcaattttgcgttgttccgccgtcagataaccgttacgggaactcagcgccagaccgtctttggcgcgcataatcggcacgccgacaatctcaatatcaaagcccatatcggcaaccattttgcggatcagtgccagttgctgaaaatctttttcaccgaagcaagcgatatctggctggaccaggttgaacagcttgctgacaatagtcgaaacgccgcgaaaatgtcccggacggctggcaccttccagcatggtggaaagaccgggaacatcaacataggtgtgggtttcagtaccgttcgggtagatctcttttaccgaaggcgcgaaaactaaatccactttacgtttgttcagcttttcgcagtcctcttgcaaggtccgtggataacgtgccagatcttccgggcggtcaaactgcattgggttaacgaaaatactgacgacgaccacatcggcgcgggctttggcttcgtcgaccagcttcatatggccgtcgtgcaggttacccatggtgggcaccagcgccacgcgcttaccttccatacgcaggcggcggatttgctgacgcagcagcggcagggtttcgataattaacacaacgtcactccttaatggaaactgtgttcttcgcccgggtaaacgccggactccacttcagccatatactgccgcacagccgcgcggatgtcgcccgtttcggcgaggaaatttttggcgaatttaggaatatgaccgccggtaatgccgaacgcgtcgtgcatcacgagaatttgcccgtcagtgacgttgcctgcgccaataccgataaccgggattgccagtgcttcggtaatgcgttttgccagttcaaccggcacgcactccagtaccagcagttgtgccccagcagcttctaatgccaatgcatcgctgagcagtcgatcgcccgcttcatcgccgcgcccctggactttgtagccaccgaaaatattcactgactgtggggttaggcctaaatgaccacaaactggaacggcacgttcggtcagcatttgtacggtttccaccagccactcaccgccttcaattttgaccatgttggctccggcacgcattaccgttgcggcgttttcaaaggcttgttccggcgtggcatacgccataaatggcaggtctgctaacagaaggcagtttggcgcaccgcggcgcacagcggcggtgtgataggcgatatcagcaacggtaaccggtagcgtggagtcatgcccctgaaccgtcatgcccagtgaatcgcctaccagcatgacgttaagtccttcttcggcaaacagtttagcgaagctgtagtcgtaagcggtgatggtcgcaaaacgctttttatcctgcttgcatttctgcaatgaagcaatcgtggttggtttcatagcgtatcctgataaatgatgttgtgctgtctcgcattttatcagtcacattggtgggggcaatgatttatccgtatcgcaccgccgttgtctggcggtgcgatagtgttatcaggggtaggtaacctgaaaagtgctggtggctttaaaatcccccggttctatagcaatattaccgtcttgttttaatgtagcctggaaatgaagaggttgtgaggtaccgtttcctttatccgggtaaattcctccggtagtgtcatcttctgtttcgtaatctttataaacagacgttgaatcatttggtttcagtaccatttgtgcacttttagtgttttttaaaccttcaatcagtacgccaacgccttttgctgcgtcatttcctgtgagtgtgttagccagaagttctttgcttacactacccaccttgtttgacttgagttttgtttctatattgcgaacacgaatacagttctgtagcgtgatatcaaaaggaaccgctgttgcgccattttttatttgtgcagggctataatcacccattttaaccgttgaaccacttaccgatgggccagtaagtgcagcagtaaaacacgttgggttggataacgtcatattatccaggtcaaaatctattttaaggaaatagctgtgcccgttgataccgccaccaagaccatatcctttgaatgagtagagataaccacccggcttagataatgttaccttgtttgtctttgtggggtcaaagttggtatcggtataaaattccaccgtgagcgactgccaaactccacctacggcccagtatttattagatgagtttgcattgttacaagaccaatatagagtggcttcactttcggggatccaccgaaaatattgagttggagaatcgccgatatacatacctgatgaactgatattggttgtggtgtatgatgaccaaatgtttgatatctttaatgtataatacaggcctgggacagatgtttcaaatagtttatgcccgccataacgtttacccgaatcaaccatttgattttcaattgccataggctcaccgcttgcagtgttacttctgttgcagtaaaggtaacctccacctgaagcgctatttaactgagaccagtataatgacacacctgttggtccgagttgggttggtttataaaaaactaagttatttgtgcttgttgaatacctgaatttgacagtaatgtctgcactggggcctgtttctctccacttttggtctcccggacccactccgtaatcattcccaacaagatagctgacgttatcatcggtgccggcacttgctgtataacaacaagagcatagtgctaaaaaaagaaagtatctgaagaatgtcttcatttttactccattgtcatgctgcaagataatacttgtagcactttgtctgttattcgtagtaaatatccactaacacatggcttatcagtgggccagaggtgacattcagcgctggatcgattttttgcattcgggtgctaaatttccaggatgaattgtttagtgctgatgacatgaccggataaacggaacgtgagctaccagtggcactaagaacgttgaaggtatttgccgggtcctgaatagaaaatataactaccccaacatttttagccccggcgttgtcttcattagcgaatatttgactggaacctgtcgccattacgccactaagtgcgcgaaaattaatatgtaactgatttaacacattccctgtgccctgaagtgtgcagtcctgtactgtaatagtgaattcttttccaccggggtgataattttcggctgaaatgtttccggtaaaatcgcccacgccaacgacacctaaatcaatatttccgttgttgctgattccactttggcaggtgttattttttatatttgcaacaatgtcaacatcctgtcctgcaaccacaggggaagtggcgctgaatagcaacgacagaagcagaattgattttttcatcagattacgttgagtgggacgcatatttagttcctgaatcagtctgcctgttagttataagtcacggtgaatgttgccggggcagtgaaatcacccgcagtgacatttgtgacagttttatcttttgcgaccaccaacaccgcactcattgggtaatcgacaacattgctgcccgttgcattagcaatactgacttcttctgttgcgggggtgacacaactgaattgtttagcgccgttcttacctggcgtagatgtgctccagacctcaacggcgaccgccgctgcttttgctgttgccgttgatgcgttagcaaatccaggaccattattagaattaccttcacataatgctcgtgtagtcaattttatttttgcctttttcccgggaatccccgcacagtctttgaactgtaatttgaaggttttaattttagttttggcattaatttcagaaatatatacatcaccgaaattgatggtggaaattttagttgtaccgtcatcagtcaacgttgatgtacaggtacccatttctacgtcagtagtaacagtcaggccaatactgtcagtggctgcatgcgaaggaatggtaaacagtgatgaagccagaaatagactacccgataatccataacataatttttttaatatcatcattgtcatccttgttattgatagctgaagttaaaagttgccagtgcgcgaaacttgcctggaacaccttgccctacacttgtttcacgcagtgcgacagtcatctcaagtccatcggtgctaatttctgatgcactccagcgtatgtattctgtgctattgggtttcagaaatgtatcgcctgaggtcgctttccttttaaatcccattccgatatagcttgtagtggaggttgtatcactggccagggggataattagcgcgggtgaacttcctgattgatttcctgtcagggttgtatcaatccagctaattccactgctgcatccattggctaccaatttaaagttggcttcagattgtgctgttttattggctattttatccattcccatcgagggaataactaaggtgtacttatcatttccattatcagtgacattagttccggtaagtgtaatattacaggttgttgctttcacggtagcggtaaaatcgacattaacatccgttgcaaataccgaaggcgataacaatagtcccatgagtattgttattttatgtggtgtgatttttatcattggaagtcccttgtagttactgtatctgacaacgaagcccgttaagaataatagattgtgctattttttctgatgtcgtgttttgttggtaatgagcaaaacaactgactggtttgccctcttcaatccaggtaattcgtatatttccttcctgttcgatgccgcgaacaaaggcctgaccaccctgacctacgttgccgatgatattgttttgttcatcataaatatccgctgcaaatggaatatttttaccatcgcttcgcacgatattcataattgccgattgtccctgaactgtttcaaaatcagcaaagacgacggctccctggcgcgggacggcgacagtactggtgcttttcaattcaacatcgttttccagatcgttaatgtccagtgcgatacgattttcatggtatggcgaaagggcgctggtcacaccataaccccagcggtctacggtgctgtttccgtagttaatacgagcgccttttgctcctggcgcctgaatgacagccagagtgtcggaatcactaaaactgtcattactgaacgtcagcccgccgctatgtaacacaaatccaccatcagtattgagtgagaattggcgactattatcactacttgctgaggctgaacctgacagcgttccccacggcgattcataactggcataaccgccgatataactcaaatcatcactggatttattcatcatataacccgtgtttacgctgtagctgatgcgattggtatcgctgtaaccactactgctgatattgagttggttattacccttaaagtcgctgtttaattgtgtatcaatactctggaagccggagctacggtgttccgtacccagtaaattttctattggaatcgtgaagctgagataaatgctatcgtcggtttgaccatcttcattcaacgaacgttgagcactgatactgtaactgccccaggacgcactattgctataaccaatagagtaattagtactgttttgcccggaggcccagtaatctgaccagcttcccgagagataaaatgaaccgtaatcctttttctcaaatttcagcggttggttgatactgaccgtgacctgatttttcatgcgcgagtaattgcgcatggatttaggctcaagatcttgctcaggatgttctacttcatcaatcagcgtcagcgcatcattgaggcccagataatgctgggtggagtagcgataggccgcgatatttaatgatgtactggtattttcaaataacttgttccaggaaatacggtagctttgtccttgataggttttatcgtccggaatgctgacatttgagtgagtaacatcgacagaaaaagcccccacgggggtattcataccaagccccagcaatccggcggtatagttattatcagttagctgaataccggtatatcctgtcaggtagttattcaaaccatagtagtagctggcttgaaataaattaggctcatcctggatactgtcttttaaaacctgaccggcgctaatatcccagcgaccaacgccagggcgcagcatttgcacaacagatgaaaatggctgggagaacgtccgttttgtgccatcagcttcttcgatagtcacaatgagatcgctgccataacctgacgggctaagatcgtcaatggcaaaagcccctggcggcaccgtcgtttcatagatcttataaccattttgcataacggttactttggcattggtattcgctacgccatgaatgattggcgcaaaactggctaataccggaggcagcattcgactgtcactgtataagcgaataccgcgaatgctgactgaatcgaaggtctcgccggtcgtgtaagattcaccaataaccagttgtgaacgtagtgacgcaagatcgcgttgtaaatagcgattctgaaaatcgtaatcgctatggacattggtcatccagttgtagttacctgaggcacgtaaccgccacgcgcctaagtttatcccaccgttgaatgccgcatagatactgtcatttgttctgcctggactttcactgtgatatccattgaggttgtaggaaagcatggctgcattaatgccattttcccacaaagagggatcaacatagttttgataattcttcataatccatgcctgggggacatcgatatccaggcgttgatcgttaacatcgtaacgaatggatgattgagggatcatttcagccagattgaggcaatcaccaagatcgtcgtctcgcttaagcaaaatggctttttcgctattcttgtctggtgaactgatatgaaattgcaataaatttttctgcgtaatgcaggcctgagcgttctttttaccttcaataacagcaaaagcaatgctttggctcatgatgggttgatcgttaacatacacactgacatcgtaaatgccaggtagtgtgggattgccttctgtataccgactaaggtcgatatttgaagcatcctttcccatcagaaatgtatggtcatattcgacgagttcagcgcataaagcactattgctatacagcagagcgcaaaacgtggcgatgtgggtaaggtgattagtagatttaatagtcacgttctgcttcctgctgtgttatatccttgccagattaaaggttggcgttgccttcaatagatccaccaaaatcattaatggcgaaaaaatgcacttttgcagagcttgttctgccactcatcccatttaccttgatgacgtcgttactgaacggcgcaatcattgtcatatccaggggatagcgtttgccgttggcttctaaatcaccactgctaaaagagacatagtagggcgtagggttatcaacgcgtaatgctgctttgccttcagatgttgcccaggaccacttcagagccaatggtgcatcagatgaaattccactcaatccttccgggcgatagaacagttttatacgtgtgcgaaatgccagttgtagcaggctttgatttgctgcttttgctgcatcgggttttggtggaacttccagtacgttaaaccagaacacactttctctgtcttttggcagagcactactggcggtgtacatcagtttgattgtttggccacgtttagcatcaatacgtgatactggtggcgtagcggtaaaggggacagtaatactgcctggttcagcgttatcatctccagtatctaaccaactctgaaccagcaatgggttattgcctttattttccagacgtacattgacgcttttttgttcgcttttataaactacgcgtgtacctgaaattacgatgtctgcaatagctgatgagctaaaagccatacagctcgctaagcacaatgctgcggtatgtttagtattaaaaaacataaaccattccttacagaattaattaaaacagggaataattatcaaaagtaaaaatatttgatgttattccctgtatatattcacccgatcaatttaagcggttgatatttactggtaagtaatggtatatgctgagttggtttttacataaccggcagtagctgctttgcttgcatccgcacgaacataggatgctttaaaatcgtaggttgcagatttagacgttgaatccagagttttgctgtaaacatcacccggattattgacctgaacctgtttaatagtagaaccttcaatattgtgcagagcgatatttacgccgtcagacggggtgttaatagacatgtcgttgttcagtgttcctttgctgttaccaaagaaaacagaaccgaaggtcatttttgcagtagtacccggagccgggttagctttgctgcagtcaatagtaatgctgaatggtttagctttagcacctacagtggtatccagtacaccatcagtaatttcagcaacagtagcggtttgcagcaggatcagaccgtctttgttaccgccatcaacacgagcttcacaagtgttatcaacgaccagaccgctaatatttaattgaccgccgtccatatcgttagcagcaaatgcagtaccagcagccattgccaacataataccggacagcgcaaaacctaattttttagacataaaaatccttgagtaatattccataaagcagataacagcattgcatgatgatgagattttgatgcaatgccatgtaactgaacgttactttgttaatgatgtttgtttgttttttactaagtattacattcattcatcattgggacagctattttgcataatgccatgacatatgcaatttaattttactaaatatgaaaattagtaaaattaactttaaaaaattaagggagtggtgtatggaattagaatttcgggaaggtatattatattttctgtgtttttatttatcttaaatatattattatttgcaatagcttaaggttatttttcggaatatatttatattcacacgaaaaataattaccacttatctaattcattaaagccttttgcctgtagagcttcaactaatgataagccatcaggaaataccaattccggcgcaatttcaaacagtggccacagcataaagccgcgatttttcatatcgtagtgcggaacggtcagacgttcggtatttattacttcattaccaaacagcatgatgtcgagatccagcgtgcgcggtccccagcgttcagctttacggacgcgaccttgctgcaattcgatacgttgtgtgtgattgagtagctcttcaggggcaagagtggttttcagcgcgacggcggcatttaagtaatcgggttgatcttgcggccccagcggtggggtgcggtaaaacgaagaaacagcaagaatgcggctttctggaatatcgcctaatgctttcagggcagcattgacctgctccagcggagaggccagattgctgcctatggcaatatacgccactgtcatgcggtaccctcacgacgcggtgcgcgtttgcgtggacgacgagtacgacgacgcggtgacggttcttcatccagttcgttaagcatccctttttggtctggtggcgcggaaacctggaactcaccccaccatttcaccagacgttgcagttcagcgttacgctcaacttcggctcgtaaggccaacaggtcgtatgccgcacggaacttaggatgctccagcagtttccatgcgcgtttaccctgacgacgggacatacgcaactgcaactgccagatatcgcgggttagcgtggtcagccgtttcgggatcgccagtgaacggcaggcttcgtccagcacgtcgttcatcgccagtgcgaaagcgtcgtgataggtcaggccgctttcctgggcgatcttctgtgccgtctccagcaatgggtaccagaacatggcggcaaacaggaacgccgggttcacgcgcatatcgttatggatacgcgtatcggtattcttcagtacctgctcaataatgcgttccatcgggctgtcgccattttccgtgaagtagcgggtaatggtcgggaacagcggctggaacagatgatattcacacagcagcttataggtttcgtaaccgtagcccgcttgtagcagtttaagcgattcttcaaacaggcgtgccggtgggatatcgttcagcagggtagcgaggcgagggatcggttctgcggtttccgggctgatgcgcatgcccaatttggcggcaaaacgaaccgcgcggagcatacgtaccggatcttcacggtagcgcgtttccgggttaccaatcagacggataacgccgtctttcagatccttcatgccgccaacgtaatcacggacggtaaaatctgccacgctgtaatacaggctgttgatagtgaaatcgcggcgctgggcgtcttcttcgatggagccgaaaatgttgtcgcgcagcaacatgccgttttgcccgcgttgggaggtcgtgcggtcgctgacgttaccttcgtgatgtccacggaaggtcgcaacttcgataatctccgggccaaacatcacatgagccagacggaaacggcgacccaccaggcggcagttacggaacagtttgcgcacctgctctggcgtggcgttggtggtcacgtcaaaatctttcggctttttgccaagtaacaggtcgcgcacgccgccgccaaccagccaggcttcgtatcccgctttattgagcctgtacattaccttcagggcattttcactgatatctttgcgggaaatagcatgctgctcacgcgggatcaccgtcacctgtggacgggcgactgcctgttcagcctcgctttcctcgcggcttagcaccttgcggcaaaaattagcgactcgggtaaaaatagtacacctcggtagtgtcaaacatcattcaggacaaaaaaatagcggctaatcatagctcagcatgacgcatttgagaatgttgaatttacaattgccgactcaggcacggcggtcagcgtccagtttttgacggctgactgaaggatttgctcgacgctgaaatcctgccagtgtgtttctacctgctgacccagaaaatgaagtgccgcgattaacaccgggcgcggatcgcctttcggcaacgcaggcgcatgattctgcttggaaagtttagcgccttgtggattaagcgccagcggtaaatggatgtaatctggcactttccagccaaaaagctggtacagcgagatttgccgcaccgtcggttcgatcaaatctgccccgcggacaatttcgctcacgccctggaagtgatcatccaccaccaccgccaggttataggcaaacaaaccatcacggcgatgaataataaaatcttcccgtgccagtttttcgtcggcgtgaataatgcctcgcagcagatcagtaaactgggtgaccggatgctgctggcggatacgtactgcggcgttgtctggtccatgatgcaaatcccggcaatgaccgtcgtaaataccgccaatgctttgaatacgcgcacgcgtgcaggtgcagtaataacttagtccttgctcatgtaaccaggcgagtgcttcgcgataggcgtggtgacgttgcgattgccagagaacgtcgccgtcccagtacaggccgtaatgttccagctggcgcaggatagtttctgcggcaccgggaacttcacgaggcgggtcgatatcttcaatgcgtaccagccagcgaccttgccgggcgcgagcctgcaaatagctgccaagcgcagcaatcagagaaccaaaatgaagctcgccggaaggagagggggcgaagcggccaatatagtgtgtgtctgtcatctctttgaacaaaaaataaggcgggagcatttcccgcctgtggtaaacgtgatggaacggctgtaattagccagccatctgtttttcgcgaatttcagccagcgttttgcagtcgatgcacagatcggctgtcgggcgcgcttccagacggcgaataccgatttcaacaccgcaggattcgcagtagccgaaatcttcgtcttccacttttttcagcgtcttctcgatctttttgatcagcttacgctcgcgatcgcggttacgcagttcgaggctgaactcttcttcctgggctgcacggtctaccgggtccgggaagttggctgcttcatcctgcatatgtgtaacggtgcgatcgacttcatccctgagttgattacgccatgcttccagaatacgacggaagtgcgccagctgggcttcattcatatactcttcgcccggcttctcctgatatggttccaccccagcgatggcgagaatactcagggacgatgttttacggttttgcccttcttgcatgttgcttctccttaacacgcactatcgatccccatgttcgggggaaaaatgaggccgctataaatagcagatgcttttccggatagcaattatctaaacgtaacacttgacaactgtgtgaggaaaagcgtatttgcgcacgcgaccagaatgtaaattaaccagttacttactctactacaatgtaaccggtagtgattttttaagagccatgccttcggcagaaagttccgctttgtaagccagaatttctacccccctctgttgagcttctgacaatagttgcgcgtatttctcatcgatgtggcgcgcgggtgaaaaccgtgtaatggctgaatgcagcacggcgaaaaagataaccgcacgctggccttcagccgctacgctcatcaactcccgaaggtgtttctgacctcgttcagtgaccgcatcgggaaaatatccctgttcgttctccgctaacgtaaccgatttcacttcaatatagcagtctggacgcgaatccgcctgcaacataaagtcaatacggctgcgttcggcgccgtattttacttcgcttttcagcgagctatagcctgccagctctgaaattgattcattaaggatagcctctttcgtcaacctgttagcccaaagcgtattgacgcaaataattgcgccgctctggctttgagttaattcccaggtgtgtgggtatttccgtttggtgttgtctgaagtcgaataccagacggtatcgccaggcgttgcacaaccggtcatcgcacccgtattcgggcagtgtagcgttaattcgcgaccatcgggtgtgatcacatcggctaaaaaacgtttgtaacgctgaattagcgtcgcgcgctgtagagggggagaaaattccattgcgacaatccttgttattgcgttagcgcccagcgttttagcggcgtgtagcgtgtgcgtccacgggcaaacgaggaggcgtaaagggtgaactccgtcaccgtatacgaccagttaaaacctggcggcgggattgtcaccgcctcgctggcgtcgcgcaataaggtaatatgtggatgaaacggacgattgctttgaaaacaaccgctgcgggcagcctgtgagcggagcatattcgccagctggattaagccgcgaggcggctgtcgcatccctaaccacaccacacgcgaacgcagccattgaccggcgtcatcaagcgtgagtgtgaaaccaggttgacgaatccgtccggctaaaagagaaagcgccttctctttctctgcgctcacttcgcctaaaaatgccagagtcagatgcaaattatcggcggcgaccggacgtcccgcctcaggtgggaagtgtgtggcgcgccagcggataatctgttcgcggatttctgcaggtaagtcgatagcaaagaacagccgttgcggttcagacatgtgaggcactcggttatgaattaccgcgatgctacaatgtggcgcgaagaatgttaaccctctggagcgttttgtgtcgtcgttgcccgttgctgccgtcttacctgagttacttgctgccctcgatggtgcatcgcaggtgttattaagtgcgccgaccggggccgggaaatcaacctggctgccgctgcaactgctggcgcatcccggcattaacgggaaaattatcctgctggagccgcgtcgtctggcggcgcgtaacgttgcgcaacgactggcggagctgcttaacgaaaagccaggcgataccgttggctaccggatgcgtgcgcaaaactgcgtcgggccgaatacccgcctggaagtgattaccgaaggcgtgctgacgcggatgatccagcgtgacccggaactgagtggtgttggattggtgatccttgatgaatttcatgagcgcagcttgcaggcggatttggcattggcgttgttactcgatgtgcaacaaggtctgcgtgatgaccttaaactgctgattatgtcggctacgctggacaacgaccgcttgcagcaaatgctgccagaagcgcccgtcgtcatctcagaagggcgctcgtttccggttgaacgccgttatttgccgctgcccgctcatcagcgttttgacgaagccgtcgcggttgctaccgccgaaatgctgcgtcaggaaagtggatcattactgttatttttacctggcgtcggagaaattcagcgtgtgcaggaacaactgacttcacgcatcggcagtgatgtgttgctctgcccgctgtatggcgcgttgtcgctgaacgatcagcgaaaagcgatcctcccggcaccgcaagggatgcgcaaagtggtgctggcgaccaatattgctgaaacaagtttaaccatcgaaggtattcgtctggtggtggattgtgcccaggaaagggtggcgcgttttgatccgcgtacagggcttacgcggttgattactcaacgcgttagtcaggcgtcgatgacgcaacgtgccgggcgtgccgggcgtctggagccgggtatctgcctgcatttaatcgccaaagaacaagcagaacgcgctgccgcgcaaagtgaaccggagatcttacaaagcgatctttccggtttgctgatggaattactgcaatggggatgcggcgatccggcgcagatgagctggctggatcaaccgccaacggtgaatctactggccgcgaaacgcctgttacagatgctgggggcgctggatggcgaacgcctaagcgcgcaagggcaaaaaatggcagcgctgggtaacgatccgcgtttagcggcaatgctggttagcgcgaagaacgacgacgaagctgctaccgcggcaaaaattgccgccattctcgaagagccgccacggatgggcaatagtgacctgggcgtggcgttttcgcgcaatcaacccgcctggcagcaacgtagtcagcaactgttaaaacgcttaaacgtacgcggcggtgaggcagacagttcgcttatcgcgccgctacttgccagagcgtatgccgatcgcattgctcgtcgccgtgggcaagatgaacgctatcaactggcgaacggcatgggggcgatgctcgatgccgacgatgcgctaagccgccacgaatggttgatcgcaccgttattattgcagggcagcgcctcgccggatgcgcggattttactggcgctgccggtcgatattgatgagttagtacaacgctgcccgcagctggtacagcagtctgacactgtggcgtgggatgacgcgcaaggtacgctgaaagcctggcgtcggctgcaaattggtcagttgatggttaaagtgcaaccgctggcgaaaccctcggaagacgagttgcatcaggcgatgcttaacggcattcgtgataaaggtttaagcgtgctcaactggacggcggaagcggaacagctacgcttgcgtttgttatgcgccgcaaagtggttgccggaatatgactggccagcggttgatgatgaaagtttgttggcgacgctggaaacgtggctactgccgcatatgacaggcgtacattcgctacgcggcctgaaatcactcgatatttatcaggcactgcgtggattacttgattgggtaatgcagcaacgtctggatagtgaattgcctgcgcattacactgtgccgacgggaagccggatcgccattcgttaccatgaagataacccgcccgcgctggcggtgagaatgcaggagatgtttggtgaggccactaatccgactatcgcccaggggcgcgtaccgttggtgctggagttgctttcccctgcccaaaggccgctgcaaatcacgcgtgatttgagcgccttctggaaaggagcgtaccgtgaggtgcaaaaagagatgaaagggcgttatcccaaacatgtctggccggacgacccggcaaacaccgcaccgacgcgacgaacgaaaaagtattcgtgaagaccaaagcaaatttgagagatatcttcttctgtcttgcaacagaagaacagaaaatcgggcttttgcgcctgaatattgcggagaaaaagcatggccgggaatgaccgcgagccaattggacgcaaagggaaaccgacgcgtccggtcaaacaaaaggtaagccgtcgtcgttacgaagatgacgatgattacgacgattatgatgactatgaggatgaagaaccgatgccgcgcaaaggtaagggcaaaggcaaagggcgtaagcctcgtggcaaacgcggctggctatggctgctgctaaaactggctatcgtttttgccgtgctgatcgccatttacggcgtttatctcgatcaaaaaattcgtagccgtattgatggcaaggtctggcaattgcccgcggcagtttatggccgaatggtcaaccttgagccagacatgaccatcagcaagaacgagatggtgaagctgctggaggcgacccagtatcgccaggtgtcgaaaatgacccgtcctggcgagtttaccgtacaggccaacagcattgagatgatccgccgtccgtttgatttcccggacagcaaagaagggcaggtgcgcgcgcgtctgacctttgatggcgatcatctggcgacgatcgtcaatatggagaacaaccgtcagttcggtttcttccgtcttgatccgcgcctgatcaccatgatttcttcgccaaacggtgagcagcgtctgtttgtgccgcgcagtggtttcccggatttgctggtggatactttgctggcgacagaagaccgtcatttctacgagcatgatgggatcagtctctactcaatcggacgtgcggtgctggcaaacctgactgccggacgcacggtgcagggggcgagtacgctgacgcaacagttggttaaaaacctgttcctctccagcgagcgttcttactggcgtaaagcgaacgaagcctacatggcgctgatcatggacgcgcgttacagcaaagaccgtattcttgagctgtatatgaacgaggtgtatctcggtcagagcggcgacaacgaaatccgcggcttcccgctggcgagcttgtattactttggtcgcccggtagaagaattgagcctcgatcagcaggcgctgttggtgggtatggtgaaaggggcgtccatctacaacccgtggcgtaacccgaaactggcgctggagcgacgtaacctggtactacgtttgctgcaacagcaacaaattattgatcaagaactctacgacatgctgagtgcgcgtccgctgggtgttcagccgcgcggtggggtgatctctcctcagccagcctttatgcagctggtgcgtcaggagctgcaggcgaaattaggcgataaggtaaaagatctctccggcgtgaagatcttcactacctttgactcggtggcccaggacgcggcagaaaaagccgccgtggaaggcattccggcactgaagaaacagcgtaagttgagcgatcttgaaaccgcgattgtggttgttgaccgctttagcggtgaagttcgtgcgatggtcggtggttctgagccgcagtttgcgggctacaaccgtgcgatgcaggcgcgtcgttcgattggttcccttgcaaaaccagcgacttatctaacggccttaagccagccgaaaatctatcgtttgaatacgtggattgccgatgcgccaatcgcgctgcgtcagccgaatggccaggtctggtcaccgcagaacgatgatcgtcgttatagcgaaagtggcagggtgatgctggtagatgcgttgacccgttcgatgaacgtgccgacggtgaatctgggcatggcgttggggctgcctgcggttacggagacctggattaaactgggtgtgccgaaagatcaactgaatccagttccagcaatgttgttgggggcgttgaacttaacgccaatcgaagtggcgcaggccttccagactatcgccagcggtggtaatcgtgctccgctttccgcgctacgttcagtcatcgcagaagacggcaaggtgttgtatcagagcttcccgcaggcggaacgcgctgttccggcgcaggcggcgtatctgacactatggaccatgcagcaggttgtacaacgcggtacgggacgtcagcttggggcgaaatacccgaacctgcatctggcagggaaaacagggactaccaacaataacgtagatacctggtttgcgggcattgatgggagcacggtgaccatcacctgggtcggccgtgataacaaccagccgaccaaactgtatggtgccagcggggcaatgtcgatttatcagcgttatctggctaaccagacgccaacgccgctgaatcttgttccgccagaagatattgcagatatgggcgtggactacgacggcaactttgtttgcagcggtggtatgcgtgtcttgccggtctggaccagcgatccgcaatcgctgtgccagcagagtgagatgcagcagcaaccgtcaggcaatccgtttgatcagtcttctcagccgcagcaacagccgcaacagcaacctgctcagcaagagcagaaagacagcgacggtgtagccggttggattaaagatatgtttgggagtaattaacgtctaagcgtgatataccggatggcgagctgccatccggtaaaataacatcccctccaaagtattaaccctttcttttcatctgattgtttattgacccttcaggaatgcgcagattgcgtaccgcttgcgaacccgccagcgtttcgaatattatctcatctttataataatcattctcgtttacgttatcattcactttacaccagagaaataccaatggcaccttccaaaactgctcagccaaaacactcactgcgtaaaatcgcagttgtagtagccacagcggttagcggcatgtctgtttatgcacaggcagcggttgaaccgaaagaagacactatcaccgttaccgctgcacctgcgccgcaagaaagcgcatgggggccggctgcaactattgcggcgcgacagtcagctaccggcactaaaaccgatacgccgattcaaaaagtacctcaatctatttctgtcgtcaccgctgaagagatggcgctgcatcagcctaagtcggtgaaagaagcgcttagctatacccctggcgttgctgtgggaacccgtggcgcatctaatacttatgattacctgatcatccgcggatttgcggcagacggccaaagccagaataactatctgaatggcctgaagttgcagggcaacttctataacgatgcggtcatcgacccgtatatgctggaacgtgctgaaattatgcgtggcccggtttccgtgctttacggtaaaagcagtcctggcggtctgttgaatatggtcagcaagcgtccgaccactgaaccgttgaaagaagttcagtttaaggccgggactgacagcctgttccagaccggttttgacttcagcgatgcactggatgatgacggcgtttattcttatcgcctgaccggtcttgcgcgttctgccaatgcccagcagaaagggtcagaagagcagcgttatgctattgcaccggcgttcacctggcgtccggacgataaaaccaatttcaccttcctttcttacttccagaacgagccggaaactggttattacggctggctgccgaaagaggggaccgttgagccgctgccaaacggtaagcgtctgccgacagactttaacgaaggggcgaagaacaacacctattctcgtaacgagaagatgattggttatagcttcgaccacgaatttaacgacacctttactgtgcgtcagaacctgcgctttgcgcaaaataaagtttcgcaaaagagcgtatatggctacggtatgtgttcagatccgctgtataccaaagaccaggaggcactcaaggcgagtccatgtttaagtatcccgcagtctcaatggggccatacactgactcgtcagtacgttatcgataatgagaagttagaaaacttctctgttgatactcagttgcaaagcaaattcgcaaccggttctgtggatcacactctgctgactggcgttgactttatgcgtatgcgtaatgacatcgactcctggttcggatatgccggttcagttgcaccatctgatatctataatttagaccgtagtgactttgattttggcgctcacccgaatccgtctggtccataccgcgttctgctgaaacagaaacaaaccggcctgtatgttcaggatcaggcgcagtgggataaagtgctggttacgcttggcggtcgctatgactgggccgatcagtcatctttcaaccgtgattacggtaataaatctgaacgtgacgacaaagagttcacctggcgtggtggtgtaaactacctgttcgacaacggcgtaacgccttacttcagctacagtgaatcatttgaacccgcttcacagactgatgcgaacggtgatctgtttgcaccttcgaaaggcaaacagtatgaagtcggcgtgaaatatgtgccagaagatcgcccaattgtggtgactggcgcactgtatcagcttaccaaaactaataacctgatggcggatccgaacggttcactgttctcggttgaaggcggtgagattcgtgcgcgtggcgtagagctggaagcgaaagcggcactgtcggcgagtgttaacgtagtcggttcttatacttacaccgatgcggaatacactaccgatactacctacaaaggcaatacgcctgcacaggtgccaaaacacatggcttcgctgtgggctgactataccttctttgacggtccgctttcaggtctgacgctgggcaccggtggtcgttatactggctccagctatggtgatccggctaactcctttaaagtgggaagttatacggtcgtggatgcgttagtgcgttatgatctggcgcgagtcggcatggcgggctccaacgtggcgctgcatgtcaacaacctgtttgatcgtgaatacgtcgccagctgctttaacacttatggttgcttctggggcgcagaacgtcaggtcgttgcaaccgcaaccttccgtttctaatttctcttttggggcacggatttccgtgcccgtttcacaagttggctgttatgcaggaatacacgaatcattccgataccacttttgcactgcgtaatatctcctttcgtgtgcccgggcgcacgcttttgcatccgttgtcgttaacctttcctgccgggaaagtgactggtctgattggtcacaacggttctggcaaatccactctgctcaaaatgcttggtcgtcaccagccaccgtcggaaggggagattcttcttgatgcccaaccgctggaaagctggagcagcaaagcgtttgcccgcaaagtggcttatttaccgcagcagcttcctccggcagaagggatgaccgtgcgtgaactggtggcgattggtcgttacccgtggcatggcgcgctggggcgctttggtgcggcagatcgcgaaaaggtcgaggaagctatctcgctggttggcttaaaaccgctggcgcatcggctggtcgatagcctctctggcggcgaacgtcagcgggcgtggatcgccatgctggtggcgcaggatagccgctgtctgttgctcgacgaaccgacttcggcgctggatatcgcccaccaggttgatgtactggcgctggtgcatcgtttaagtcaggagcgaggcctgacggtcattgccgtgctgcacgatatcaatatggcggcgcgctactgtgattatctggtcgccctgcgcggcggtgaaatgattgctcagggaacgcctgcggaaattatgcgcggcgaaaccctcgaaatgatttatggcatcccgatgggtattctgccgcatccggcgggtgctgcacctgtgagttttgtttattgatgagcggcttacctcttatttcgcgccgccgactgttaacggcgatggcgctttctccgttgttatggcagatgaataccgcccacgcggcagttattgatcccaatcgtattgtggcactggagtggttgccggtggagttactgctggcgctcggcatcgtgccttacggcgtggcggacaccatcaactatcgcctgtgggtcagcgaaccgccattgccggactcagtgattgacgttggtttgcgtacagaacccaaccttgaactgctgaccgaaatgaaaccgtcgtttatggtctggtctgcaggatatggcccttcaccagaaatgctggcacgtattgcgccggggcgcggatttaacttcagcgacggcaaacagccactggcgatggcgcgtaaatcactgacggaaatggcagatttacttaacctgcaaagcgcagcggaaacgcatttagcgcactatgaagactttatccgcagcatgaaaccccgctttgtgaagcgtggtgcacgcccgttattgctgacgacgcttatcgatccgcgccatatgttggtcttcggtccaaacagcttgttccaggaaattctcgatgagtacggcatcccaaatgcctggcaaggggaaaccaacttctggggcagtaccgccgtcagtatcgatcgtctggcagcgtataaagacgttgatgtgctctgttttgatcacgacaacagcaaagacatggatgcgctaatggcaaccccgctgtggcaggccatgccgtttgtctgcgccggacgctttcagcgcgtacctgcagtctggttctatggtgcgacgctttctgcaatgcactttgtgcgtattctggataacgccatcggaggtaaagcgtgagtaaacgaattgcgctttttccggtgttattgctggcgctgctggtggttgctgctgcggcgttgacctggatgaacttctcgcaggcgctgccgcgcagccagtgggcgcaggccgcctggtcgccggatattgacgtcatcgagcagatgatttttcactacagcttgttgccgcgtctggcgatttcgctgctggtgggcgcgggcctggggctggtgggcgtgctgtttcagcaagtgctgcgtaacccgctggcggaaccgacgacattgggtgttgcaacaggcgcgcaactggggattaccgtcaccacgctctgggcaatccccggcgcgatggcgagccagtttgctgcgctggcaggggcttgtgttgttggcttaatcgtctttggcgtcgcgtgggggaaacgtctttcgccggtaacgctgatcctcgcggggctggtagtgagcctttattgcggtgcaatcaatcagttactggttatcttccatcatgaccaactgcaaagcatgttcctgtggagcaccggaacgctgacgcaaaccgactggggcggcgttgagcgtttatggccgcagctgctgggcggcgtgatgctgacgttattgctacttcgcccgttaactctgatggggcttgatgatggcgtggcgcgcaatctcgggctggccttgtcgctcgctcgtctggcggcgttgtcgctggcgattgtcatcagtgcgctgctggtgaacgcggtggggattatcggctttatcggtttgttcgcgccactgctggcgaaaatgctgggggcgcggcgtttgttgccacggttgatgctggcatcgctgattggtgcgttaattctgtggctttctgatcaaatcatcctctggctgactcgcgtgtggatggaagtgtctaccggttcggtcactgcgttgatcggtgcgccgctgctactgtggctgctgccgcgtttacgcagcattagcgcgccggatatgaaggtcaacgatcgtgtcgcgactgaacgccaacacgtgctggcgtttgccctcgcgggcggcgtgctgctgttgatggctgtggtggtggcgctgtcgtttggtcgtgatgcgcacggctggacgtgggcgagcggggcgttgctcgaggatttgatgccctggcgctggccgcgaattatggctgcgctgtttgcgggcgtcatgctggcggtggcgggctgtattattcagcggctgacaggaaacccgatggcaagcccggaagtgctggggattagctccggcgcggcgtttggcgtggtgttaatgctgtttctggtgccgggtaatgcctttggctggctgttacccgcaggcagtctcggggcggcggtgacgctgttgatcattatgatcgccgccggacgcggtggattttccccacaccgcatgttactggcggggatggcgttaagtaccgcgttcaccatgcttttgatgatgttgcaggcaagtggtgacccgcgaatggcgcaagttctgacctggatttccggttcgacctacaacgcgaccgatgcgcaggtctggcgtaccggaattgtgatggtgattttgctggcgattaccccgctgtgccgccgctggctgaccattttaccgctgggtggtgataccgcacgagccgtggggatggcgctgacgccgacgcgaattgcgctgctgctgttagcggcttgcctgacggcgaccgcgacaatgaccattggaccgttgagttttgttggtttaatggcaccgcatattgcgcggatgatgggctttcgacggacgatgccacacatcgtaatttcggcgctggtgggtggtttactgctggtgttcgctgactggtgtgggcggatggtgctgtttccattccagatccccgcggggctactgtcgacctttatcggcgcgccatattttatctatttgttgagaaagcagagccgttaattgaatgcctcgcccggtgggcgaggcaaaatcatcacaacttcgcaaacacccgacgtgcagcatcgatggtgttattgatatcttccatgctatgcgccacggacataaagcccgcttcaaacgctgacggtgccaggtaaacaccttcgtccagcatcatatggaagaaacgcttaaagcgttccacgtcacaggccatcacatcctgatagcacgtcacggactcggcgtcggtaaagaaaataccgaacatgccgccaacgtggtttaccaccagcggaattccggcttcttctgccgcttcccgcagaccttctgccagacgtgttgtcagctcatccagcgtctcgtgaacgcccggctgtgcgacttcattcagacaggcgaaaccagcagccatcgcaatcgggttaccggaaagcgtacccgcctgatagaccggaccggtcggggccagcgcatccattacatcacgacgaccaccgaatgcgcctaccggcattccaccgccgatgattttgccgaggcaggtgagatccggttccacaccgtaataatcctgtgcgccagctagcgctacgcggaaaccggtcatcacttcatcgatgatcagcaacgcgccaaattcgtcgcacagcgcgcgcagacctggcaggaactctggcagcggtggaacgcagttcatattgcctgccaccggctcgacgataatacaggcaatctcttgcgggtattgctcaaacgcggcgcgtacagaggccagatcgttataagtacaggttaaggtatgtttggcgaaatctgccggaacgcccggcgaatttggctggcctaacgtgagtgcgccagaaccggctttcaccagcaggcagtcagcgtgaccgtggtaacaaccttcaaatttaataattttgtcgcgaccggtaaaaccacgggccaggcggatggcgctcatcgtcgcttcagtgccggagttcaccatgcgcaccatatccatggtcgggaccagttcggtcaccagttgcgccattttcacttccatttcggttggtgcaccaaagcttaaaccacgctcggcggcttcaatcacggcattgcggatcgccggatggttatggcccagcaccatcggcccccaggaaccgacataatcgatataggctttgccatcaacatcgtacagataagcgccgtccgctttttcgataaacagtggagtgccgcccacgccagtaaaggcgcgaacaggggagttcacaccgccagggatcagctcgcgcgctgcgctgtaaagattttcagacttactcatggagggttcctgattcgtagaaaaagtgaatggctgctattctatgttattcataacaagttaaatactcgtcaaacatcaggctgcttgtactggtgcaatcctgatttcttagagtataaaagttttgtgcatttgaaacattacgctttgcaaaggattttcatggaacgtgcgagtaaaatgccgtcatcttatttgtatgaccaataagtgatcattggatgaaaactgatactccctctttagaaacaccgcaggccgcgcgcctgcgacgcagacaactgattcgccaacttcttgagcgcgataaaaccccgttagccattttgtttatggcggcagtcgtcggcacgcttgtcgggctagctgcggttgcttttgacaaaggtgtcgcctggttgcagaaccaacgtatgggggcactggtacatactgctgataattatccgcttctgttaaccgtcgcttttctctgttcggcggtgctggcgatgttcggctactttttggtgcgcaaatacgcgccggaagcaggtggttcggggatcccggaaattgaaggggcgctggaagatcaacgtcccgttcgctggtggcgtgtgttgccggtgaaattctttggcgggctgggaacactcggcggaggcatggtgttggggcgcgaagggccaaccgtgcagataggcggcaatatcgggcggatggtacttgatgttttccgcctgaaaggtgacgaagctcgtcatacgctgttggcaaccggtgctgctgcggggctggctgcggcctttaacgcgccgctggcgggtattttgtttattatcgaagagatgcgtccgcagtttcgctatacgttaatttcgattaaagcggtatttattggcgtcattatgtcgaccattatgtaccggatttttaatcatgaagttgcgttgattgacgtcggtaaactttctgatgcgccgcttaatacgctgtggctttatctgatcctcggtattatttttggcattttcggccctatttttaataaatgggtgctggggatgcaggatttgctgcaccgtgtgcacggtggcaatattaccaaatgggtactgatgggcggtgcgattggcggtctgtgtggattgctggggtttgtggcaccagcaacttcgggcggcggttttaacctgattcctatcgctaccgcggggaatttcagcatgggaatgctggtgtttatcttcgtcgcgcgggtcattaccactttactctgcttctcttccggcgcgccgggcggtatttttgccccgatgctggcgctgggtactgtgctgggaaccgctttcggaatggttgccgttgagttgtttccgcaatatcaccttgaggcggggacgtttgctattgccggaatgggggcgttactggcggcatctattcgcgcgccgttaacggggatcattctggttctggaaatgaccgataactaccagctcattttgccaatgattattaccggtcttggcgcaacactattagcacaatttaccggtgggaaaccgctatactcggcgattcttgcgcgcacgctggcaaaacaggaagctgagcaactggcgcgaagcaaggccgcatcagcccgcgagaatacttgaacgaaataccagggtattagataatggcgattattattgggttagaatttgcccaattgccgatgtcgtttggagcaaaatatgagtgatgacgtagcactgccgctggagtttaccgacgcagcagccaacaaagttaaaagcctgatcgctgacgaagataacccgaatctgaaattacgcgtgtatatcaccggtggcggttgcagcggcttccagtatggtttcacctttgatgatcaggtgaacgaaggcgatatgaccatcgaaaaacagggcgttggcctggtggttgatccgatgagcctgcaatatctggtcggcggttccgttgactataccgaaggtctggaaggttctcgtttcatcgtgaccaacccgaacgcgaaaagcacctgtggttgcggttcttccttcagcatataatctgttgttcatgtgccggataaactatccggcacatcttctctcttcaacgcccattctcatccagcgcaaacgtcggtagcttaagatgccaacgaatagccgccagccgaatcaatagcgtcacgaccatgcccatcatactggctgtttccagtggtacggaaaatgtgtaataagccgtagcgtggacaataccgccgataatacaggcagttgcgtagatttctgtacgtaaaatcatggggatttcgcgggccagtacatcacgaatgatcccgccgccaacgccagtaatgacgcccatacaaaccgcgattaacggaccggcttccgcattaaaggctttattcacgccaatgccgacaaacaccgccagaccaacggcgtccagcaccggcaacatccattttggtaagcgtcttggctggcgcaccagcacgatggtcagcatgctggtgaccattgcaacgaccagatcggtgggatctttcacccaaaataccgggccgtgatccagcgccatgtcgcgaattgttccgccgcctactgcggttaccacgcccagtaccagaacaccaaaagggtccatacgcaattttccggctaacaaaacgccggagatggcaaataccgctgtgccgactatatccagccaatagacgagcattgttcaatccccactgagcacctgaaaaggtcaggcgctaatctacctgtgaaagcgcattacagagctgttgtgcagcgaggataatacgtgggcttgcacgttcaaaccagtcactcgtgagaggaataacgggaattttgagctgttcaccccagtattgtttgattttaggaatttggtccggtccgcctgtaatgacaatcgcctgtggcgagcgtgctaacacctgttcgcggctaacttgcggccagggaacccggctgtctttaaagatgttttctccgccacaaacttcgagtacctggttctgaatcgactcttttccactggtaaatggcggattaatgccgaattgcagaaaaacacgttttttaggtttatcagcatattgcgctttcaattgcgcgtactgatccagcagggattgcgcggcttgttcggccttatccggttgcggactccagggggccagttgacgtaacgcattggcaatttgttcaatgcttgtcgcatcgacccacatcacttttattcccagcgaagccagctggtcaacctgccgctcggcattacctccacgccaggcaatcaccagatcgggtttcagcgcgacaatgcgttccagattcatcccctgccaggtggaaacctgctcaatcttttgcgcttgtagaggatagtcggaatagctgctgaccccaaccggcgtgatcccggcggcaaaggcaagttcagtgttggcgggagaaagcgtgatgacgcgcggcgcggcattgagccacagcggcgcgagaaaagacagggcgaccagcgccctgaacagtgacttagccatgtgccagtttctgcaccagtgactcaaccatcaggctggactgtttagcggcaacagccaggaactcatcgaagctaagatgagactgttgatcggccacgtcggagatggcgcgtacgacgacaaacgggacgttgaaattgtggcagacatgggcgattgccgtcgcttccatctctacagcaatggcctgtgggaagttgtggcggattttcgccagaccaacagaaccgttgatgaaagcgtcgccgctaacaatcaggccacgtacagcgttaagattcagttcggcaatgcaggcctcagcggcagcgatcagtttatcgtcagctttgaagcctgccgggcagcctggtaactgaccgtattcataaccaaatgccgtgacatccgcgtcgtgataacgcgcttcgtccgagacaacgatatcgcccactttcagcgttggtgccaggccaccggcagaaccggtgttaataatcacatctggcttgcagtgttccaacagcaaagtggcacccagcgccgcagcgactttaccgatgcccgatttcagaagcgcaacctcggttccattcagttggccggtatagatttcgcaaccgcccagactgatagtttgacggttttcgattttgtcacgcagcagcgtaacttcttcttccattgcaccaatgatgccgattttcatagatttactcgcgataagcccgatttgaaggcatagtttaccatgcgcttacggggaagcgtatttctcacgcgggagaggacatggcacagattgatttccgaaaaaaaataaactggcatcgtcgttaccgttcaccgcagggcgttaaaaccgaacatgagattctgcggatcttcgagagcgatcgcgggcgtatcatcaactctccggcaattcgtcgtctgcaacaaaagacccaggtttttccactggagcgcaatgccgccgtgcgcacgcgtcttacccactcgatggaagtccagcaggtggggcgctacatcgccaaagaaattttaagccgtctgaaagagcttaaattactggaggcgtatggtctcgatgaactgaccgggccctttgaaagcattgttgagatgtcatgcctgatgcacgatatcggcaatccgccgtttggtcattttggcgaagcggcgataaatgactggtttcgccagcgtttgtacccggaagatgccgaaagccagcctctgactgacgatcgctgcagcgtggcggcactacgtttacgggacggggaagaaccgcttaacgcgctgcggcgcaagattcgtcaggacttatgtcattttgaaggtaacgcacagggtattcgtttggtgcatacattgatgcggatgaatctcacctgggcacaggttggcggtattttaaaatatacccgtccggcgtggtggcgtggcgaaacgcctgagacacatcactatttaatgaaaaagccgggttattatctttctgaagaagcctatattgcccggttgcgtaaagaacttaatttggcgctttacagtcgttttccgttaacgtggattatggaagctgccgacgacatctcctattgtgtggcagaccttgaagatgcggtagagaaaaggatatttaccgttgagcagctttatcatcatttgcacgaggcgtggggccagcatgagaaaggttcgctcttttcgctggtggttgaaaatgcctgggaaaaatcacgctcaaatagtttaagccgcagtacggaagatcagttttttatgtatttacgggtaaacaccctaaataaactggtaccctacgcggcacaacgatttattgataatctgcctgcgattttcgccggaacgtttaatcatgcattattggaagatgccagcgaatgcagcgatcttcttaagctatataaaaatgtcgctgtaaaacatgtgtttagccatccagatgtcgagcagcttgaattgcagggctatcgggtcattagcggattattagagatttatcgtcctttattaaacctgccgttatcagactttactgaactggtagaaaaagaacgggtgaaacgtttccctattgaaacgcgcttattccacaaactctcgacgcgccatcggctggcctatgtcgaggctgtcagtaaattaccgtcagattctcctgagtttccgctatgggaatattattaccgttgccgcctgctgcaggattatatcagcggtatgaccgacctctatgcgtgggatgaataccgacgtctgatggccgtagaacaataaccaggcttttgtaaagacgaacaataaatttttaccttttgcagaaactttagttcggaacttcgcgctataaaacgaatctgaagaacacagcaattttgcgttatctgttaatcgagactgaaatacatgaaaaaaaccacattagcactgagtgcactggctctgagtttaggtttggcgttatctccgctctctgcaacggcggctgagacttcttcagcaacgacagcccagcagatgccaagccttgcaccgatgctcgaaaaggtgatgccttcagtggtcagcattaacgtagaaggtagcacaaccgttaatacgccgcgtatgccgcgtaatttccagcagttcttcggtgatgattctccgttctgccaggagggttctccgttccagagctctccgttctgccaggggggcctgggcggtaatggcggcggccagcaacagaaattcatggcgctgggttccggcgttatcattgatgccgataaaggctatgtcgtcaccaacaaccacgttgttgataacgcgacggtgattaaagtccaactgagcgatggtcgtaagttcgacgcgaagatggttggcaaagatccgcgctctgatatcgcgctgatccagatccagaacccgaaaaacctgaccgcaattaagatggcggattctgatgcgctgcgcgtgggtgattacaccgtagcaattggtaacccgttcggcctgggcgagacagtaacttccgggattgtctctgcgctgggacgtagcggcctgaacgctgaaaactacgaaaacttcatccagaccgatgcagcgatcaaccggggtaactcaggtggtgcgttggttaacctgaacggcgaactgatcggtatcaacaccgcgatcctcgcaccggacggcggaaacatcggtatcggttttgctatcccgagcaacatggtgaaaaacctgacctcgcagatggtggaatacggccaggtgaaacgtggtgagttgggtattatgggcactgagctgaactccgatctggcgaaagcgatgaaagttgacgcccagcgcggtgctttcgtaagccaggttctgccgaattcttccgccgcgaaagcgggcattaaagcgggtgatgtgatcacctcactgaacggtaagccaatcagcagctttgccgcactgcgtgctcaggtgggcactatgccggtaggtagcaaactgaccctgggcttactgcgcgacgggaagcaggttaacgtgaacctggaacttcagcagagcagccagaatcaggttgattccagcaccatcttcaacggcattgaaggcgctgagatgagcaacaaaggtaaagatcagggcgtggtggtgaacaacgtgaaaacgggcactccggctgcgcagatcggcctgaagaaaggtgatgtgattattggcgcgaaccagcaggcagtgaaaaacatcgctgaactgcgtaaagttctcgacagcaaaccgtctgtgctggcactgaacattcagcgcggcgacagcaccatctacctgttaatgcagtaatttccctcaaccccttcctgaaaacgggaaggggttctccttacaatctgtgaacttcaccacaactccatacatcttcatcatcctttgggcatttgcacaatgccgtacgttacgtacttccttatgctaagccgtgcataatggaggacttatggctggctggcatcttgataccaaaatggcgcaggatatcgtggcacgtaccatgcgcatcatcgataccaatatcaacgtaatggatgcccgcgggcgaattatcggcagcggcgatcgtgagcgtattggtgaattgcacgaaggagcattgctggtactttcacaaggacgagtcgtcgatatcgatgacgcggtggcacgtcatctgcacggtgtgcggcaggggattaatctaccgttacggctggaaggtgaaattgtcggcgtaattggcctgacaggtgaaccagagaatctgcgtaaatatggcgaactggtctgcatgacggctgaaatgatgctggaacagtcgcggttgatgcacctgttggcgcaggatagccgtttgcgggaagaactggtgatgaacctcattcaggctgaggagaatactcccgcacttactgaatgggcgcaacggctggggatcgatctcaatcaaccgcgagtggtggctattgttgaggtcgacagcggtcagcttggtgtggacagcgcaatggcggagttacagcaactgcaaaatgcgctgactacgcccgagcgtaataatctggtggcgattgtctcgctaaccgaaatggtggtgttgaaaccggcgttgaactcttttgggcgctgggacgcagaagatcatcgtaagcgagttgaacaactgattacccgcatgaaagagtatggccagctgcgttttcgcgtttcgctgggcaactattttaccggtcctggcagtattgcccgatcctatcgtacggcgaaaacgacgatgatggtgggtaaacagcggatgccagaaagtcgctgctatttttatcaggatctgatgttacctgtgttactcgacagtttgcgtggcgactggcaggccaacgaactggcgcgaccgctggcacggctgaaagcgatggacaataacggcttgctgcggcgaacgctggcggcgtggtttcgccacaatgtgcaaccgctggcaacgtcaaaggcgttgtttattcatcgtaatactctggaatatcggcttaatcgtatatcggaactgaccgggcttgatttgggcaattttgatgacaggttgctgctgtatgtggcgttacaactggatgaagagcggtaggtcgattacaaaattacagccgggtgagactttacccggccacagaatggcattatttacgcgtcagtttttccagatcggcttcaatctcgctgatcttattggttactactgactccaggtgacgtaagtcgtcgaggatcttacgcttaagatcaacttcgctgcggtcacgctggcagatttgatcaagctcatcaatgatataccgtagattcgggctaatttcctggacttctttataaccctgacccacaccatcagcgacgaccgttttacgctgacgcgggtatttaaacttcacgctcttggcgaaaaactcgcctttgtctttctggaaatagattttcagaatatcgttgttggcttcctgccggaggctgtaacgatcaatttcttcaggattggtaatacccagacttttcagattgtcgtacatagcgttacctcaaaatgagtcagtaaattgtgcttattttagcatttggcctggcccgcccggctcgactgtgatcgcagaaagcctttttcttccagacttctatcatggcgtaaaaatcaaaaaattacctgctttattgtggtgatattctatgggatggattagcacatttatcttcattttgcgaattacatgacagtccgaaacaagatgaaaaagtatttaaaaaaaagggggaaaatgagtaggacgaattattctgagccagaaagcaatcgggcagcgtcgtgctgcccgtgtacatacttttagtcgatggtacgcagcagttcgttaataccaactttgccgcgagttttcgcgtcaactttcttaacgataactgcacagtagaggctgtatttgccatctttcgacggcagattacctgaaacaaccacagaccctgccggaacgcgaccgtagtggatttcgccggtttcacggtcataaatacgggtgctctgaccaatgtatacgcccatagagatgacggaaccttcttcgacaatcaccccttcaaccacttcagagcgtgcgccgatgaagcagttatcttcaataatggtcgggttagcctgcagcggctccagcacgccgccgatacccacgccaccggaaaggtggacgtttttaccaatctgcgcacaggaaccgacggtcgcccaggtatcaaccatggtgccttcatcaacatatgcgccgatgttgacgtaagacggcatcagcacggtgttacgggcaatgaacgcgccctgacgcactgccgctggtggcacgacgcggaagccttctttctggaaaagtgcttcatcgtagttagcgaatttcatcggcactttgtcgaagtagcggctttctgccccttcgatcacctgattatcattaatacggaaagagagcagcaccgcttttttcaaccactgatgcgtcacccactgaccgtcaattttttccgctacacgcagtgcgccggaatccagcagggcgatcacctgatttaccgcttcgcgggtaacggtgtctgcattggctggcgtgatctcggcacggcgttcaaaagcggtttcaataatgttctgtaactgctgcattgttaaactcttttcatatcagtaaacacatcaccctttatcgtttggattgagggcctctgtcaaccgctgatgcacttcctgctgcaactcgttattaagcgcacgccggtcagcggtggcaattatgaataaatcttctactcgctcgccaatggttgtaattcgggcgccatgaagcgaaattcccagatcggcaaaaattttcccgactcgcgccagcagtccaggttggtcgagggcgatcagttcgaggaacgatttgcggtcggtatgggtcggcaaaaacgtcacttcggtttcaacagtaaaatggcgcaatttagcgggttggcgacggggctgcggtggctgccagctactttgtgtcagtacttgctccagaccaaaccgaataacctcatgacgatctgcggatagcgggctaccatcgggttccagcactataaaggtatccatcgccataccgtcgcgagtggtgaaaatttgtgcgtcgtgaacacttaaattgcggcggtctaattcggcacagacggcggcaaacagataggggcggtccgggctccagataaaaatctcggtgcctccacgcgtagcctgcgggctaagcagtaccagcggtttgcctaaatcatgctgtaataaatggcgtgcgtgccaggccagttgatttgggctatggcggacaaaatagttagcgcgacagcgtgaccaaatttggtgcagcgcctcttcgtcgatgttatccatgcgcagtagtgccagcgcctggagttggtgatggcgaacccgttcgcgcatatccggcgtgttttgcattccgcgtcgtagctgcttttcggtggcaaaatagagttcgcgcaacagactttgcttccagctattccacagtgtttcgttggtggcgcaaatgtcagccactgtcaggcataccagatagcgcagacgattttccgtttgaacttcttcggcaaactgcttgatgacttccgggtcctgaatatcgcggcgctgagcggtcaccgacatcagcaagtgctggcgaaccagccaggcgaccagctgtgtttcgcgtgagttcagcccgtggagttcggcaaaatgcactacatcctgagcaccgagaatggagtggtcgccgccgcgtcctttggcgatatcgtgaaacagcgcggcgatgaaaatcagctcagttgacggcaggcgcggccagacgtccacacacaacggatggcgctggcgcgtttcttcactggcaaaactctccagtttcagcatcacgcggatagtatgttcatccaccgtgtaggcatggaacaggtcaaactgcatctgcccgacgatatgcgaccattgcggcatatacgcgccgagcacgctatggcgatgcattggcaatagcccgcgccgcaccgctccggggtgacgcagaatgctcaaaaacagttttcgcgcttccggaatattacacagaggttgttgcagatggcgacgggcgtggcgtaactggcgtagcgtggtggagtaaatgccggtgatcgcgctgttgcgcaccatggtgtagaacatacgcaagatggcttccggctggcgcataaatagtgtttcatcacgcaggtcgatcagcgttccgcgtagctgaaactcatcgtcgattggacgtggtttttcgtcggcgggaagggcgaggatggcttcatcgaacagttgcagcagcatctggttgagttcactgacgcggcgtgtaacgcggaagtaatccttcatcatccgctcgaccggttcgttaccttcaccactgtaattcaaacgctgggcgacgctaagctggcgatcgaataacaggcgattatcgtaacgactgacgaccagatgcagggcaaagcgaatgcgccacaatatatgcaggcattcgtttaattccgctcgctccgcagaggttaagaagccaaaccctaccatttcatccagcgatgttgcgccaaaatgacggcgggccacccattgcagagtgtggatatcgcgcaagccgccggggctacttttgatgtctggttcaaggttgtagctggtgccgtggtaacgctgatggcgctggttctgttcttcaactttcgccgcgtagaacttgtcggaaggccagaatccttcgctaaaaatatgtttttgcagttcgaggaacagtgcaacatcgccaattaataagcgggattcgattaaattagtggcgacggttaaatccgataacccttccagcatgcactcttcaagcgtgcgcacgctatgacccacttccagctttacatcccagagcagcgttaacagctcgcccactttttgcgcctgatcgtccgggagctttttacggcttaaaatcagtaaatcgatgtcagaaagtggatgcagctcgccacgaccgtagccaccgacggcgaccaatgccaggtcggcaatctggctgaatcccgcttcaatccataatcgttgaagaagctggtcgataaactcggtacgcgcctcaatcaactgttctgcggagataccattgtcaaaggcatcacccagccaacgctggaaagtatcgatatgggcttttatcccaccgacggttaattcatcacggggccaggcgcatggattttgcggttgaccgtgcagggtggggagagcggtgtttgcgtactgttctggaagggtattcattgtgcgccacccataagattaaattattgcattaaaaaagccggcattcgccggcttcattttattcgtcgtgcgagattatcgccgggatggtgtcatccttgcgtagcgtcagaatttcgcagccgttatcagtcaccacaatagtatgctcatattgtgcagacaagctgcgatctttggtttttaccgtccagccatctttcatggtgcggatctcttttttacccgcgttgaccattggctcgatggtgaacgtcatccccggtttcagcacgacgttggtttcacgggagtcatagtgcagcacctgcggttcttcgtggaagccgcgaccaataccgtgtccacaatattcacgaacgacggagaagccttctgcttcgacaaatttctgaattgccgcaccgatttcgcgcagattaatgccaggttttaccatgcgtagcgccaggtacaggctttcttgcgtgatgcggcacagacgttcgcccatgatggtcggcttaccgacgataaacattttcgaggtatcgccgtggaaaccatctttgattacggtgacatcaatgttaacgatatcgccatctttcagcagcttggcgtcgtccgggataccgtggcacaccacttcattaatagagatgcaaacggatttcggatagccgtgatagccgaggcaggcagaaaccgcgtgttgttcattaacaatgtaatcattacagatgcgatccaactcgccggtgctgacgcccggtttaacatatggttcgatcatctccagcacttcggcagccagtcggccagcgacgcgcattttttcgatatcttctggggtcttgattgagatagccattaattctgtccatcagcgtcggtgataccgacaatatatatgtaagtgccgtcaatggtatcacacccgggcaaattgagaatcattctgaatttcgccaaacgtgccactgaaggttttctataatagaaaattcaacgtctgatgctgtacacagcgccaacaattattggtgtccacgacgtatttgtggtataaagcgcgccggacttccgatccatttcgtatacacagactggacggaagcgacaatctcactttgtgtaacaacacacacgtatcggcacatattccggggtgccctttggggtcggtaatatgggatacgtggaggcataaccccaacttttatatagaggttttaatcatggcaactgtttccatgcgcgacatgctcaaggctggtgttcacttcggtcaccagacccgttactggaacccgaaaatgaagccgttcatcttcggtgcgcgtaacaaagttcacatcatcaaccttgagaaaactgtaccgatgttcaacgaagctctggctgaactgaacaagattgcttctcgcaaaggtaaaatccttttcgttggtactaaacgcgctgcaagcgaagcggtgaaagacgctgctctgagctgcgaccagttcttcgtgaaccatcgctggctgggcggtatgctgactaactggaaaaccgttcgtcagtccatcaaacgtctgaaagacctggaaactcagtctcaggacggtactttcgacaagctgaccaagaaagaagcgctgatgcgcactcgtgagctggagaaactggaaaacagcctgggcggtatcaaagacatgggcggtctgccggacgctctgtttgtaatcgatgctgaccacgaacacattgctatcaaagaagcaaacaacctgggtattccagtatttgctatcgttgataccaactctgatccggacggtgttgacttcgttatcccgggtaacgacgacgcaatccgtgctgtgaccctgtacctgggcgctgttgctgcaaccgtacgtgaaggccgttctcaggatctggcttcccaggcggaagaaagcttcgtagaagctgagtaataaggcacgctcgtacgagcccttatagaccaggtagtacacgtttggttagggggcctgcatatggccccctttttcacttttatatctgtgcggtttaatgccgggcagatcacatctccgaggattttagaatggctgaaattaccgcatccctggtaaaagagctgcgtgagcgtactggcgcaggcatgatggattgcaaaaaagcactgactgaagctaacggcgacatcgagctggcaatcgaaaacatgcgtaagtccggtgctattaaagcagcgaaaaaagcaggcaacgttgctgctgatggcgtgatcaaaaccaaaatcgacggcaactacggcatcattctggaagttaactgccagactgacttcgttgcaaaagacgctggtttccaggcgttcgcagacaaagttctggacgcagctgttgctggcaaaatcactgacgttgaagtactgaaagcacagttcgaagaagaacgtgttgcgctggtagcgaaaattggtgaaaacatcaacattcgccgcgttgctgcgctggaaggcgacgttctgggttcttatcagcacggtgcgcgtatcggtgttctggttgctgctaaaggcgctgacgaagagctggttaaacacatcgctatgcacgttgctgcaagcaagccagaattcatcaaaccagaagacgtatccgctgaagtggtagaaaaagaataccaggtacagctggatatcgcgatgcagtctggtaagccgaaagaaatcgcagagaaaatggttgaaggccgcatgaagaaattcaccggcgaagtttctctgaccggtcagccgttcgttatggaaccaagcaaaactgttggtcagctgctgaaagagcataacgctgaagtgactggcttcatccgcttcgaagtgggtgaaggcatcgagaaagttgagactgactttgcagcagaagttgctgcgatgtccaagcagtcttaattatcgaaaaggagccgcctgagggcggcttctttttgtgcccatcttgtaaattcagctaacccttgtggggctgcgctgaaaagcgacgtacaatgtcgctagtattaattcatttcaatcgttgacagtctcaggaaagaaacatggctaccaatgcaaaacccgtctataaacgcattctgcttaagttgagtggcgaagctctgcagggcactgaaggcttcggtattgatgcaagcatactggatcgcatggctcaggaaatcaaagaactggttgaactgggtattcaggttggtgtggtgattggtgggggtaacctgttccgtggcgctggtctggcgaaagcgggtatgaaccgcgttgtgggcgaccacatggggatgctggcgaccgtaatgaacggcctggcaatgcgtgatgcactgcaccgcgcctatgtgaacgctcgtctgatgtccgctattccattgaatggcgtgtgcgacagctacagctgggcagaagctatcagcctgttgcgcaacaaccgtgtggtgatcctctccgccggtacaggtaacccgttctttaccaccgactcagcagcttgcctgcgtggtatcgaaattgaagccgatgtggtgctgaaagcaaccaaagttgacggcgtgtttactgctgatccggcgaaagatccaaccgcaaccatgtacgagcaactgacttacagcgaagtgctggaaaaagagctgaaagtcatggacctggcggccttcacgcttgctcgtgaccataaattaccgattcgtgttttcaacatgaacaaaccgggtgcgctgcgccgtgtggtaatgggtgaaaaagaagggactttaatcacggaataattcccgtgatggataaataagggtaagattccgcgtaagtatcgcgggggatcttacccgtaatatgtttaatcagggctatacttagcacacttccactgtgtgtgactgtctggtctgactgagacaagttttcaaggattcgtaacgtgattagcgatatcagaaaagatgctgaagtacgcatggataaatgcgtagaagcgttcaaaacccaaatcagcaaaatacgcacgggtcgtgcttctcccagcctgctggatggcattgtcgtggaatattacggcacgccgacgccgctgcgtcagctggcaagcgtaacggtagaagattcccgtactctgaaaatcaacgtgtttgatcgttcaatgtctccggccgttgaaaaagcgattatggcgtccgatcttggcctgaacccgaactctgcgggtagcgacatccgtgttccgctgccgccgctgacggaagaacgtcgtaaagatctgaccaaaatcgttcgtggtgaagcagaacaagcgcgtgttgcagtacgtaatgtgcgtcgtgacgcgaacgacaaagtgaaagcactgttgaaagataaagagatcagcgaagacgacgatcgccgttctcaggacgatgtacagaaactgactgatgctgcaatcaagaaaattgaagcggcgctggcagacaaagaagcagaactgatgcagttctgatttcttgaacgacaaaaacgccgctcagtagatccttgcggatcggctggcggcgttttgctttttattctgtctcaactctggatgtttcatgaagcaactcaccattctgggctcgaccggctcgattggttgcagcacgctggacgtggtgcgccataatcccgaacacttccgcgtagttgcgctggtggcaggcaaaaatgtcactcgcatggtagaacagtgcctggaattctctccccgctatgccgtaatggacgatgaagcgagtgcgaaacttcttaaaatgatgctacagcaacaggggagccgcaccgaagtcttaagtgggcaacaagccgcttgcgatatggctgcgcttgaggatgttgatcaggtgatggcagccattgttggcgctgctgggctgttacctacgcttgctgcgatccgcgcgggtaaaaccattttgctggccaataaagaatcactggttacctgcggacgtctgtttatggacgccgtaaagcagagcaaagcgcaattgttaccggtcgatagcgaacataacgctatttttcagagtttaccgcaacctatccagcataatctgggatacgctgaccttgagcaaaatggcgtggtgtccattttacttaccgggtctggtggccctttccgtgagacgccattgcgcgatttggcaacaatgacgcccgatcaagcctgccgtcatccgaactggtcgatgggacgtaaaatttccgtcgattcggctaccatgatgaacaaaggtctggaatacattgaagctcgttggctgtttaacgccagcgccagccagatggaagtgctgattcacccgcagtcagtgattcactcaatggtgcgctaccaggacggcagtgttctggcgcagctgggtgaaccggatatgcgtacgccaattgctcacaccatggcatggccgaatcgcgtgaactctggcgtgaagccgctcgatttttgcaaactaagtgcgttgacatttgccgcaccggattatgatcgttatccatgtctgaaactggcgatggaggcgtttgaacaaggccaggcagcgacgacagcattgaatgccgcaaatgaaatcaccgtggctgcttttcttgcgcaacaaatccgctttacggatatcgctgcgttgaatttatccgtactggaaaaaatggatatgcgcgaaccacaatgtgtggatgatgtgttatctgttgatgcgaacgcgcgtgaagtcgccagaaaagaggtgatgcgtctcgcaagctgaggataatccggctacagagagtcgcgctatttgttagcgtagggcttcagtgatatagtctgcgccatctgatcgtaagtagttggctttataaggtcaggtatgccgtggttttacacggcttttttttgtataggcttcagtattcctgagtaccgtaaaccctgtcagggaataagaaacgcgtgatgttgtctgctactcaaccacttagcgaaaaattgccagcgcatggctgtcgtcatgttgcgatcattatggacggcaatggtcgctgggcaaaaaagcaagggaagattcgtgcctttgggcataaagccggggcaaaatccgtccgccgggctgtctcttttgcggccaacaacggtattgaggcgttaacgctgtatgcctttagtagtgaaaactggaaccgaccagcgcaggaagtcagtgcgttaatggaactgtttgtgtgggcgctagatagcgaagtaaaaagtctgcaccgacataacgtgcgtctgcgtattattggcgataccagtcgctttaactcgcgtttgcaagaacgtattcgtaaatctgaagcgctaacagccgggaataccggtctgacgctgaatattgcggcgaactacggtggacgttgggatatagtccagggagtcaggcaactggctgaaaaggtgcagcaaggaaacctgcaaccagatcagatagatgaagagatgctaaaccagcatgtctgtatgcatgaactggcccctgtagatttagtaattaggactgggggggagcatcgcattagtaactttttgctttggcaaattgcctatgccgaactttactttacagatgttctctggcccgatttcgatgaacaagactttgaaggggcgttaaatgcctttgctaatcgagagcgtcgtttcggcggcaccgagcccggtgatgaaacagcctgatgggggtcgcttttgctgaagtatcgcctgatatctgcttttgtgttaatacccgtcgtcatcgcggcgttgtttctgttgccgccggtggggttcgccattgtaacgctggtggtctgtatgctggcagcgtgggaatggggacagcttagcggttttaccactcgttcgcagcgagtatggttggcggtgttatgcgggttattgttggcgctgatgctttttctgttgccggaatatcaccgaaatattcatcaaccgctggttgaaatctcactttgggcttcgctgggttggtggattgtcgcgctattgctggtgctgttttacccaggttccgcagcaatctggcgtaactctaaaacattgcgcattatttttggcgtgctaaccattgttcccttcttctggggcatgctggcgttacgggcctggcactacgacgagaatcattacagtggcgcaatatggctgctctatgtcatgatcctggtatggggcgctgactctggcgcatatatgtttggcaaattgtttggtaaacataaactggcaccgaaggtttctccgggtaaaacctggcaaggctttatcggtggactcgcgaccgcagcggtaatctcatggggttatggcatgtgggtgaatctcgacgtcgctcccgtcaccttactcatttgctctattgtcgcagcgttagcctcagtgctcggcgatctgaccgaaagtatgtttaagcgtgaagcaggaattaaggacagcggtcatttaattccaggacacggtggtattttagatcgtattgatagcctgacggctgcggtaccggtctttgcttgcttgttgttactggtattcaggacgctttaacggaaggtaatatgctgagttttctctgggatttggcttcgttcatcgttgcactgggtgtacttatcaccgtgcatgaatttggtcatttctgggttgcccggcgttgtggtgttcgcgttgagcgtttctcaatagggtttggtaaggcgctctggcggcgaactgataagctcggcaccgaatatgttatcgccctgatcccgttgggcggttatgtcaaaatgctggatgagcgcgcagaaccggtcgttccggaactccgccaccatgccttcaataataaatctgtcggccaacgagcggcgattattgccgcaggtccggttgcaaacttcatttttgctatctttgcctactggctggtttttattattggtgtgcctggcgtacgtcccgtggttggtgaaatagcagccaattcgatagctgcggaagcacaaattgcaccaggtacggaactaaaagccgtagatggtatcgaaacgcctgattgggatgccgtgcgtttgcagttggtcgataaaattggcgatgaaagcaccaccattacggtagcgccatttggcagcgaccaacggcgggatgtaaagctcgatttacgtcactgggcgtttgagcctgataaagaagatccggtatcttcgttggggattcgtcctcgtgggccgcaaattgaacctgtactggaaaatgtgcagccaaactcggcggcaagcaaggcaggtttgcaagcaggcgacaggatcgttaaagtcgatggtcagcccttaacgcagtgggtgacctttgtgatgcttgtccgggataacccgggtaaatccttagcgttagaaatcgaaaggcaggggagtcccttgtctttgacattaatcccggagagtaaaccgggtaagggtaaagcgattggttttgtcggtattgagccgaaagtcattcctttgccagatgagtataaagttgtacgccagtatgggccgttcaacgctatcgtcgaagccacggacaaaacgtggcagttgatgaagctgacggtcagtatgctgggaaaattgatcaccggtgatgtgaaactgaacaacctcagtgggccgatctctatcgccaagggggctgggatgacagcggaactcggggtagtttattacctgccgtttcttgcgcttattagcgtgaacttagggataattaacctgtttccgttgcccgtacttgacggggggcatctgctgttccttgcgatcgaaaagatcaagggcggaccggtatccgagcgggttcaagacttttgttatcgcattggctcgattctgctggtgctgttaatggggcttgcacttttcaatgatttctctcggttatgagagttagttaggaagaacgcataataacgatggcgatgaaaaagttgctcatagcgtcgctgctgtttagcagcgccaccgtatacggtgctgaagggttcgtagtgaaagatattcatttcgaaggccttcagcgtgtcgccgttggtgcggccctcctcagtatgccggtgcgcacaggcgacacggttaatgatgaagatatcagtaataccattcgcgctctgtttgctaccggcaactttgaggatgttcgcgtccttcgtgatggtgatacccttctggttcaggtaaaagaacgtccgaccattgccagcattactttctccggtaacaaatcggtgaaagatgacatgctgaagcaaaacctcgaggcttctggtgtgcgtgtgggcgaatccctcgatcgcaccaccattgccgatatcgagaaaggtctggaagacttctactacagcgtcggtaaatatagcgccagcgttaaagctgtcgtgaccccgctgccgcgcaaccgtgttgacctaaaactggtgttccaggaaggtgtgtcagctgaaatccagcaaattaacattgttggtaaccatgctttcaccaccgatgaactgatctctcatttccaactgcgtgacgaagtgccgtggtggaacgtggtaggcgatcgtaaataccagaaacagaaactggcaggcgaccttgaaaccctgcgcagttactatctggatcgcggttatgcccgtttcaacatcgattctacccaggtcagtctgacgccagataaaaaaggtatttacgtcacggtgaacatcaccgaaggcgatcagtacaagctttctggcgttgaagttagcggcaatcttgccgggcactccgctgaaattgagcaactgactaagatcgagccgggcgagctgtataacggcaccaaagtgaccaaaatggaagatgacattaaaaagcttcttggtcgctatggttatgcctatccgcgcgtacagtcgatgcctgaaattaacgatgccgacaaaaccgttaaattacgcgtgaacgttgatgcgggtaaccgtttctatgtgcgtaagatccgttttgaaggtaacgatacctcgaaagatgccgtcctgcgtcgcgaaatgcgtcagatggaaggtgcatggctggggagcgatctggtcgatcagggtaaggagcgtctgaaccgtctgggcttctttgaaactgtcgataccgatacccaacgtgttccggggagcccggatcaggttgatgtagtttacaaggtgaaagaacgtaacaccggtagcttcaacttcgggattggttacggtactgaaagtggcgtgagcttccaggctggtgtgcaacaggataactggttaggtacgggttatgctgttggtatcaacgggaccaaaaacgattaccagacctatgctgaactgtcggtaaccaacccgtacttcaccgtagatggcgtaagcctcggtggtcgtctcttctataatgacttccaggcagatgacgccgacctgtccgactataccaacaagagttatggtacagacgtgacgttgggcttcccgatcaacgaatataactcgctgcgtgcaggtctgggttatgtacataactccctgtccaacatgcagccgcaggttgcgatgtggcgttatctgtactctatgggtgaacatccgagcacctctgatcaggataacagcttcaaaacggacgacttcacgttcaactatggttggacctataacaagcttgaccgtggttacttcccgacagatggttcacgtgtcaacctgaccggtaaagtgaccattccgggatcggataacgaatactacaaagtgacgttagacacggcgacttatgtgccgattgatgatgatcacaaatgggttgttctgggtcgtacccgctggggttatggtgatggtttaggcggcaaagagatgccgttctatgagaacttctatgccggtggttccagcaccgtgcgtggcttccagtccaataccattggtccgaaagcagtttacttcccgcatcaggccagtaattatgatccggactatgattacgaatgtgcgactcaggacggcgcgaaagatctgtgtaaatcggatgatgctgtaggcggtaacgccatggcggttgccagcctcgagttcatcaccccgacgccgtttattagcgataagtatgctaactcggttcgtacttccttcttctgggatatgggtaccgtttgggatacaaactgggattccagccaatattctggatatccggactatagtgatccaagcaatatccgtatgtctgcgggtatcgcattacaatggatgtccccattggggccgttggtgttctcctacgcccagccgttcaaaaagtacgatggagacaaggcagaacagttccagtttaacatcggtaaaacctggtaagtgttctccacaaaggaatgtagtggtagtgtagcgatgactttaggcgatcaatataagatcgccgggccacgcaaagaactgcaccctccggtgcaaatgggatggtaaggagtttattgtgaaaaagtggttattagctgcaggtctcggtttagcactggcaacttctgctcaggcggctgacaaaattgcaatcgtcaatatgggcagcctgttccagcaggtagcgcagaaaaccggtgtttctaacacgctggaaaacgagttcaaaggccgtgccagcgaactgcagcgtatggaaaccgatctgcaggctaaaatgaaaaagctgcagtccatgaaagcgggcagcgatcgcactaagctggaaaaagacgtgatggctcagcgccagacttttgctcagaaagcgcaggcttttgagcaggatcgcgcacgtcgttccaacgaagaacgcggcaaactggttactcgtatccagactgctgtgaaatcagttgccaacagccaggatatcgatctggttgttgatgcaaacgccgttgcttacaacagcagcgatgtaaaagacatcactgccgacgtactgaaacaggttaaataagtaatgccttcaattcgactggctgatttagcgcagcagttggatgcagaactacacggtgatggcgatatcgtcatcaccggcgttgcgtccatgcaatctgcacaaacaggtcacattacgttcatggttaaccccaaataccgtgagcatttaggcttgtgccaggcgtccgcggttgtcatgacccaggacgatcttcctttcgcgaaaagtgccgcgctggtagtgaagaatccctacctgacttacgcgcgtatggcgcaaattttagataccacgccgcagcccgcgcagaacattgcacccagtgcggtgattgacgcgacggcgaagctgggtaacaacgtatcgattggcgctaacgcggtgattgagtccggcgttgaactgggcgataacgtgattatcggtgccggttgcttcgtaggtaaaaacagcaaaatcggtgcaggttcgcgtctctgggcgaacgtaaccatttaccatgagatccagatcggtcagaattgcctgatccagtccggaacagtggtaggcgcagacggctttggttatgctaacgatcgtggtaactgggtgaagatcccacagattggtcgcgtaattattggcgatcgcgtggagatcggtgcctgcactaccattgatcgtggcgcgctggatgacactgttattggcaatggtgtgatcattgataaccagtgccagattgcacataacgtcgtgattggcgacaatacggcagttgccggtggcgtcattatggcgggcagcctgaaaattggtcgttactgcatgatcggcggagccagcgtaatcaacgggcatatggaaatatgcgacaaagtgacggttacgggcatgggtatggtgatgcgtcccatcactgaaccaggcgtctattcctcaggcattccgctgcaacccaacaaagtctggcgcaaaaccgctgcactggtgatgaacattgatgacatgagcaagcgtctgaaatcgcttgagcgcaaggttaatcaacaagactaacgttccatcttttgttcgccaaactttacggcctgtctcattcttacgattgcggcaggccgtgttattattgtcgtttcttatattttgacaggaagagtatcttgactactaacactcatactctgcagattgaagagattttagaacttctgccgcaccgtttcccgttcttactggtggatcgcgtgctggattttgaagaaggtcgttttctgcgcgcagtaaaaaatgtctctgtcaatgagccattcttccagggccatttccctggaaaaccgattttcccgggtgtgctgattctggaagcaatggcacaggcaacaggtattctggcgtttaaaagcgtaggaaaactggaaccgggtgagctgtactacttcgccggtattgacgaagcgcgctttaagcgcccggtcgtgcctggcgatcaaatgatcatggaagtcactttcgaaaaaacgcgccgcggcctgacccgttttaaaggggttgctctggtcgacggtaaagtagtttgcgaagcaacgatgatgtgtgctcgtagccgggaggcctgatacgtgattgataaatccgcctttgtgcatccaaccgccattgtggaagagggcgcgtcgattggcgcgaacgctcacattggtcctttttgtatcgttggaccccatgtcgaaattggtgagggtaccgtactgaaatctcacgttgtcgtgaatggtcatactaaaattggccgcgataatgagatttatcagttcgcctccatcggcgaagttaaccaggatctgaaatatgctggcgaaccgacccgcgtggaaatcggcgatcgtaaccgcattcgcgaaagcgtcaccattcatcgtggcacagtccagggcggtggattgacgaaggtgggcagcgacaacttactgatgatcaatgcgcacattgcgcacgattgtacggtaggtaaccgctgcatcctcgccaacaacgcaacgctggcgggtcacgtatcggttgacgacttcgcgatcatcggcggcatgaccgcagtccatcagttctgcatcattggtgcgcatgtgatggttggcggctgctccggtgtggcgcaggacgtccctccttatgtcattgcgcagggtaaccacgcaacgccgttcggtgtcaatatcgaagggctgaagcgccgcggattcagccgtgaggcgattaccgctatccgcaatgcgtataagctgatttatcgtagcggtaaaacgctcgatgaagtgaaaccggaaattgctgaactggcggaaacatatccggaagtgaaagcctttaccgatttctttgcacgctcaacgcgcggtctgattcgttaatgactgaacagcgtccattaacgattgccctggtcgccggagaaacctccggcgatatcctgggggccggtttaatccgcgctctgaaagaacgtgtgcccaacgcccgctttgttggtgttgccgggccacgaatgcaggctgaaggctgcgaagcctggtacgaaatggaagaactggcagtgatgggcattgttgaagtgctaggtcgtctgcgtcgcttactacatattcgtgccgatctgacaaagcgttttggcgaattgaagccagatgtttttgttggtattgatgcgcctgacttcaatattactcttgaaggtaaccttaaaaagcagggtatcaaaaccattcattacgtcagcccgtccgtctgggcgtggcgacagaaacgcgttttcaaaataggcagagccaccgatctggtgctcgcatttctgcctttcgaaaaagcgttttatgacaaatacaacgtaccgtgccgctttatcggtcataccatggctgatgccatgccattagatccagataaaaatggtgcccgtgatgtgctggggatcccttacgatgcccactgtctggcattgttgccgggcagccgtggtgcagaagtcgaaatgcttagtgccgatttcctgaaaacggcccagcttttgcgccagacatatccggatctcgaaatcgtggtgccgctggtgaatgccaaacgccgcgagcagtttgaacgcatcaaagctgcagtcgcgccagacctgtcggttcatttgctggatggaatgggccgtgaggcgatggtcgccagtgatgcggcgctactggcgtcgggtacggcagcactggagtgtatgttggctaaatgcccgatggtagtgggatatcgcatgaagcctttcaccttctggctggcgaagcgactggtgaaaactgattatgtctcgctgccaaatctgctggcgggcagagagttagtcaaagagttattgcaggaagagtgtgagccgcaaaaattggctgcggcgctgttaccgctgttggcgaacgggaaaaccagccatgcgatgcacgacaccttccgcgagctgcatcagcagatccgctgcaatgccgatgagcaggcggcacaagccgttctggagttagcacaatgatcgaatttgtctatccgcacacgcagctggttgcgggtgtggatgaagtcggacgcgggccgttagttggcgcggtcgtcaccgctgcggtgatccttgacccggcgcgcccaattgccgggctgaatgattccaaaaagctgagcgaaaaacgccgtctggcgctctgtgaagagatcaaagagaaagcgttgagctggagtctgggccgcgcggaaccccacgaaatcgacgaactgaacattcttcatgcgaccatgctggcgatgcagcgcgccgtcgcggggctgcatattgcgccggaatatgtgttgattgatggtaaccgctgcccaaaattaccgatgccttcgatggcagtggtgaaaggcgatagccgcgtaccggaaatcagtgctgcgtccatcctggcgaaagtgacgcgcgacgccgaaatggcggcgctggatattgttttcccgcaatatggttttgcccaacacaaagggtatccaaccgcttttcatctggaaaaactggctgaatatggcgcgactgaacatcatcgtcgtagctttgggcctgtcaaacgcgcactgggacttgcgtcctgattcttgtgtcgagattaagtaaaccggaatctgaagatgtctgaaccacgtttcgtacacctgcgggtgcacagcgactactcgatgatcgatggcctggccaaaaccgcgccgctggtaaaaaaggcggcggcgttgggtatgccagcactggcgatcaccgatttcaccaacctttgcggtctggtgaagttctacggagcgggacatggcgcagggattaagcccatcgtcggggcagattttaatgtccagtgcgacctgctgggtgatgagttaacccacctgacggtgctggcggcgaacaatatcggctatcagaatctgacgttgctgatctcaaaagcgtatcagcgcgggtacggtgccgccgggccgatcatcgatcgcgactggcttatcgaattaaacgaagggctgatcctcctttccggcgggcgcatgggcgacgtcgggcgcagtcttttgcgtggtaacagcgcgctggtagatgagtgcgttgcgttttatgaagagcacttcccggatcgctattttctcgagctgatccgaaccggcaggccggacgaagaaagttatctgcacgcggcagtggaactggcggaagcgcgcggtttgcccgtcgtggcgaccaatgacgtgcgctttatcgacagcagcgactttgacgctcacgaaatccgcgtcgcgatccatgacggctttactctcgacgatcccaaacgcccgcgtaattattcgccgcagcaatatatgcgcagcgaagaggagatgtgcgagctgtttgccgacatccccgaagcccttgccaacactgttgagatcgccaaacgctgtaacgtgactgtgcgtctgggtgaatacttcctgccgcagttcccgaccggggacatgagcaccgaagattatctggtcaagcgtgcaaaagaaggcctggaagagcgtctggcatttttattccctgacgaggaagaacgtcttaagcgtcgcccggagtatgacgagcgtctggatactgaacttcaggttatcaaccagatgggcttcccgggttacttcctcatcgttatggaatttatccagtggtcgaaggataacggcgtaccggtagggcctggccgtggttccggtgcagggtcactggtggcctacgcgctgaaaattaccgacctcgatccgctggaatttgacctgctgttcgaacgtttccttaacccggaacgtgtctccatgcctgacttcgacgttgacttctgtatggagaaacgtgaccaggttatcgaacacgtggcggacatgtacggtcgcgatgcggtatcgcagatcatcaccttcggtacgatggcggcgaaagcggtgatccgcgacgtaggtcgtgtactggggcatccgtacggatttgtcgatcgtatctcgaaactgatcccgcccgatccggggatgacgctggcgaaagcgtttgaagccgagccgcaactgccggaaatctacgaagcggatgaagaagttaaggcgctgatcgacatggcgcgcaaactggaaggggtcacccgtaacgccggtaagcacgccggtggggtggttatcgcgccgaccaaaattaccgattttgcgccgctttattgcgatgaagagggcaaacatccggttacccagtttgataaaagcgacgttgaatacgccgggctggtgaagttcgacttccttggtttgcgtacgctcaccatcatcaactgggcgctggagatgatcaacaagcggcgggcgaagaatggcgagccgccgctggatatcgccgcgatcccgctggatgacaagaaaagtttcgacatgctgcaacgctctgaaaccacggcggtattccagcttgaatcgcgcggcatgaaggatctgatcaaacgtctgcaacctgactgcttcgaagatatgatcgcactggtggcgctattccgtcccggtccgttgcaatcagggatggtggataactttatcgaccgtaaacatggtcgcgaagagatctcctatccggatgtgcagtggcagcatgaaagcctgaaaccggtactggagccaacctacggcattatcctgtatcaggaacaggtcatgcagattgcccaggtgctttctggttataccctcggtggcgcggatatgctgcgtcgtgcgatgggtaagaaaaagccggaagagatggccaagcagcgttctgtatttgctgaaggcgcagaaaagaacgggatcaacgccgaactggcgatgaaaatcttcgacctggtggagaaattcgccggttacggatttaacaaatcgcactctgcggcctatgctttggtgtcatatcaaacgttatggctgaaagcgcactatccggcggagtttatggcggcagtaatgaccgccgatatggacaacaccgagaaggtggtgggcctggtggatgagtgctggcggatggggctgaaaatcctgccaccagatataaactccggtctttaccatttccacgtcaacgacgacggcgaaatcgtgtatggtattggcgcgatcaaaggggtaggtgaaggtccgattgaggcgatcatcgaagcccgtaataaaggcggctatttccgtgaactgtttgatctctgcgcccgtacagacaccaaaaagttaaaccggcgagtgctggaaaaactgatcatgtccggggcgtttgaccgtcttgggccacaccgtgcggcgctgatgaactcgctgggcgatgcgttaaaggcggctgatcaacacgcgaaagcagaagccatcggtcaggccgatatgttcggcgtgctggcagaagagccggaacaaattgaacaatcctacgccagttgccaaccgtggccggagcaggtggtgttagatggggaacgtgaaacgttaggtctgtacctgacgggacaccctatcaaccagtatttaaaagagattgagcgttatgtcggaggcgtaaggctgaaagacatgcacccgacagaacgtggtaaagtcaccacggctgcggggctcgttgttgctgcgcgggttatggtcaccaagcgcggcaatcgtatcggtatctgcacgctggatgaccgttccgggcggctggaagtgatgttgtttactgacgccctggataaataccagcaattgctggaaaaagaccgcatacttatcgtcagcggacaggtcagctttgatgacttcagcggtgggcttaaaatgaccgctcgcgaagtgatggatattgacgaagcccgggaaaaatatgctcgcgggcttgctatctcgctgacggacaggcaaattgatgaccagcttttaaaccgactccgtcagtctctggaaccccaccgctctgggacaattccagtacatctctactatcagagggcggatgcacgcgcgcggttgcgttttggcgcgacgtggcgtgtctctccgagcgatcgtttattaaacgatctccgtggcctcattggttcggagcaggtggaactggagtttgactaatacaggaatactatgagtctgaatttccttgattttgaacagccgattgcagagctggaagcgaaaatcgattctctgactgcggttagccgccaggatgagaaactggatattaatatcgatgaagaagtgcatcgtctgcgtgaaaaaagcgtagaactgacgcgtaaaatcttcgccgatctcggtgcatggcagattgcgcaattggcacgccatccacagcgtccttataccctggattacgttcgcctggcctttgatgaatttgacgaactggctggcgaccgcgcgtatgcagacgataaagctatcgtcggtggtatcgcccgtctcgatggtcgtccggtgatgatcattggtcatcaaaaaggtcgtgaaaccaaagaaaaaattcgccgtaactttggtatgccagcgccagaaggttaccgcaaagcactgcgtctgatgcaaatggctgaacgctttaagatgccaatcatcacctttatcgacaccccgggggcttatcctggcgtgggcgcagaagaacgcggtcagtctgaagccattgcacgcaacctgcgtgaaatgtctcgccttagcgtaccgactatctgcactgttatcggtgaaggtggttctggcggcgcactggcaattggcgtgggcgataaagtgaatatgctgcaatacagcacctattccgttatctcgccggaaggttgcgcgtccattctgtggaagagcgccgacaaagcaccgctggcggctgaagcgatggggatcatcgctccgcgtctgaaagaactgaaactgatcgactccatcatcccggaaccgctgggcggcgctcaccgtaacccggaagcgatggcggcgtctctgaaagcgcaactgctggcggatctggccgatctcgacgtgttaagtactgaagatttaaaaaatcgtcgttatcagcgcctgatgagctacggctacgcgtaatcggcaaatgttctgaaaggggtcacttcggtggcccttttttatcgtcacggtttgagcaggctatgattaaggaaggattttccaggaggaacacatgaacatcattgccattatgggaccgcatggcgtcttttataaagatgagcccatcaaagaactggagtcggcgctggtggcgcaaggctttcagattatctggccacaaaacagcgttgatttgctgaagtttatcgaacataacccacgaatttgcggcgtgatttttgactgggatgagtacagtctcgatttatgtagcgatatcaatcaacttaatgaatatctcccgctttatgccttcatcaacacccactcgacgatggatgtcagcgtgcaggatatgcggatggcgctctggttttttgaatatgcgctggggcaggcggaagatatcgccattcgtatgcgtcagtacaccaacgaatatcttgataacattacgccgccgttcacgaaagccttgtttacctacgtcaaagagcggaagtacaccttttgtacgccggggcatatgggcggcaccgcatatcaaaaaagcccggttggctgtctgttttatgattttttcggcgggaataccctcaaggcggacgtctctatttcggtcaccgagcttggttcgttgctcgaccacaccgggccacacctggaagcggaagagtacatcgcgcggacgtttggcgcggaacagagttatatcgttaccaacggaacatcgacgtcgaacaaaattgtgggtatgtacgccgcgccatccggcagtacgctgttgatcgaccgcaattgtcataaatcgctggcgcatctgttgatgatgaacgatgtagtgccagtctggctgaaaccgacgcgtaatgcgttggggattctgggtgggatcccgcgcggtgaatttactcgcgacagcatcgaagagaaagtcgctgccaccacgcaggcacaatggccggttcatgcggtgatcaccaactccacctatgatggcttgctctacaacaccgactggatcaaacagacgctggatgtcccgtcgattcacttcgattctgcctgggtgccgtacacccattttcatccaatctaccagggtaaaagtggtatgagcggcgagcgtgttgcaggaaaagtgatcttcgaaacgcagtcgacccacaaaatgctggcggcgttatcgcaggcgtcgctgatccacattaaaggtgagtatgacgaagaggcgtttaacgaagcctttatgatgcataccaccacctcgcccagttatcccattgttgcttctgttgagacggcggcggcgatgttgcgtggtaatccgggcaaacggctgattaaccgttcagtagaacgagctctgcattttcgcaaagaggtccagcggctgcgggaagagtctgacggctggtttttcgatatctggcaaccgccgcaggtggatgaagccgaatgctggcccgttgcgcctggcgaacagtggcacggctttagcgatgcggatgccaatcacatgtttctcgatccggttaaagtcactattttgacaccggggatggacgagcagggcaatatgagcgaggaggggatcccggcggcgctggtggcaaaattcctcgacgaacgtgggatcgtagtagagaaaaccggcccttataacctgctgtttctctttagtattggcatcgataaaaccaaagcaatgggattattgcgtgggttgacggaatttaagcgctcttacgatctcaacctgcggatcaaaaatatgctgcccgatctctatgcagaagatcccgatttctaccgcaatatgcgtattcaggatctggcgcaagggatccataagctgattcgtaaacacgatcttcccggtttgatgttgcgggcatttgataccttgccggagatgatcatgacgccacatcaggcatggcagagacagattaaaggcgaagtagaaaccattgcgctggaacaactggtcggtagagtatcggcaaatatgatcctgccttatccacccggcgtaccgctgctgatgccgggagaaatgcttaccgaagagagccgcacggtactcgattttctactgatgctttgttccgtagggcaacattaccccggttttgaaacggatattcacggcgcgaaacaggacgaagacggtgtttaccgcgtacgagtcctaaaaatggcaggataacttgccagagcggcttccgggcgagtaacgtgctgttaacaaataaaggagacgttatgctgggtttaaaacaggttcaccatattgcgattattgcgacggattatgcgatgagcaaagctttctactgcgatattcttggtttcacgctgcaaagcgaagtctatcgcgaagcgcgcgactcgtggaaaggggatttggcgcttaatgggcaatatgtgattgagcttttctcatttccgttcccgccggagcgccccagccgaccggaagcttgcggcctgcgtcatctggcttttagcgttgatgatatcgatgcggcagtggcgcaccttgaaagccataacgtgaagtgtgaagccatccgtgtcgatccctacacgcaaaaacgcttcacgttctttaacgatccggacgggctgccgttggaactgtatgagcagtaaggcttgtcatcgccgcatttgcccggtaacgtgcccggcattgctactgtaaaatcgcaccatcatgacactcacgctcaatagacaacttctctcctcacgccagattctggtggcctttagcggcggccttgattctactgtcttactgcatcaactggtgcagtggcggacggaaaatccgggcgtcactctgcgcgctatccatgtgcatcacggtttaagcgccaatgctgatgcatgggtgaaacattgtgaaaacatctgccaacagtggcaggtgccgctggtggtcgaacgtgtgcagcttgcgcaagaggggctaggtattgaggctcaggctcggcaggcgcgttatcaggcatttgcccgcaccttgttacccggcgaagtgctggttacagcgcaacatcttgacgatcaatgtgaaacctttctgctggcgctaaaacgcggtagcggccctgccgggctttcggctatggcggaagtttcggagtttgccggaacacagcttatccgcccgttgcttgcccgcacgcggggggaactggagcagtgggcgttggcgcatggtttacgctggattgaagacgaaagtaatcaggatgatagctacgatcgtaactttctgcgcctgcgcgtagtgccgttattgcagcagcgttggccgcattttgccgaagcaacagcgcgcagcgccgcactttgcgctgaacaagagagcctgttagatgaactgctggcggatgatttagcgcactgtcaaactccgcaggggacgctgcagattgcgccaatgctggcgatgagtgatgcccgtcgcgcggcgattatccgccgctggctagcagggcagaatgcaccgatgccttcccgcgacgcgttggtgaggatctggcaggaagtggcgctggcgcgggaagatgcctccccctgtttacgtttgggcgcgtttgaaatccgccgctatcagtcgcaactatggtggattaaatccgttgccgggcaaagcgaaaccattctgccgtggcagacgtggctacaaccgctggaattaccggcggggctgggaagtgtacagcttactgcgggaggcgatattcgccctccgcgtgcagatgaagcggtcagcgtgcgtttcaaagcgccaggactgctgcatattgtcgggcgcaacggcggacgtaagctgaagaaaatctggcaagagttaggcgttccgccgtggctacgtgataccacgccactgctgttttatggcgaaacgctgattgcggcggcaggggtatttgtgacgcaagaaggtgtggctgtaggtgagaatggcgtcagttttgtctggcagaaaacgcttagtcaagtgaaagccggataagacgcatcaaacgtcgcatccggcgaaagtcaatcaggactcgctcaccaccaccgtaccgatttccgggtggctaaagctggtaattttatccagacgcagctcgcgggttgcaccagcggcctcgacgaccagatactccacatttttgcgggagactaaatcgctggccttcgcctgcaatttttcgccatctttcagctcaagtgtcagcattaaatgatgctggcaggcgagctcaagattatcgtaatcatcacaattgattggttgatacgtatcattcattgacataatcgctcaccagtaagtttgccgcagcgtatgctgctttttccctgacagcctcagaaagggtgtcgtcggcagccatttcattcagcactttcaaaacgcagcccagcgcgtccggaacgtatcctaagtctccgctggcgatttccgcgtaccgcttgcgtattaactcacaatatttttccacatgccctcctgtcagcactctgacttaaccgtggatgcaagtctaagcctacgaagataaactctgtttcgcaaggtgactataccacactcatttctgcaatatcagcgccgcaactgcacgtattccgttacaatggcctcctgattcgaaaggagttttcttatggcgcttaaagcgacaatttataaagcgacggttaatgtggccgatctcgaccgcaaccagtttctcgatgcctctctgacgttggcgcgccatccttcagaaacccaggagcgtatgatgctgcgcctgctggcgtggctaaaatatgccgatgaacgtctgcaatttacccgtggtttgtgtgccgatgatgagccggaagcgtggctgcgtaacgatcatttgggtattgatttgtggattgagctggggctgccggatgagcgacggattaagaaagcctgcacccaggccgcagaagtggcgctgtttgcctataatagtcgggcggcgcaaatctggtggcagcaaaatcagagcaaatgtgcgcagtttgccaatctttccgtctggtatctggacgacgagcagctggcgaaagtgagcggctttgccgatcgtaccatgacgctgcaggcaacgattcaggatggtgttatctggttatcggatgataagaataatctggaagtgaacttaaccgtctggcaacaaccttcatgattgtgatttcccgacatgttgctatccctgatggcgagtttgagatcaccgccattcgtgcgcagggcgcgggcgggcagcatgttaataagacctcaacggctattcatctgcgttttgacattcgggcgtccagcctgccagagtattacaaagagcgtctgctcgccgccagccatcatttgatcagcagtgacggagtgattgtcattaaggcacaggaataccgaagtcaggaactgaaccgcgaagcggcgctggcccggctggtggcagtgattaaagatttaacaacagaacaaaaagcccgaagacctacgcggcccacccgtgcatcgaaagagcgcaggctggcatcgaaagcacaaaaatcaagcgtgaaggcgatgcgcggcaaagtgcgcagcggtcgggaataaaaagaaggaatggatggtgaaaaaagcgatagtgacagcgatggctgtaatcagcctctttactctgatgggatgtaataatcgggccgaagtcgatacgctttctccggcgcaggctgccgaattgaaaccgatgccgcaaagttggcgcggcgtgctgccgtgtgctgattgcgaaggaatcgaaacctctctgttcctcgaaaaagacggaacctgggtgatgaatgagcgttatctgggggctcgtgaagaaccttcctccttcgcttcctacggtacatgggcgcgaaccgctgacaagctggtattaaccgatagcaaaggtgaaaagtcatattatcgcgcgaaaggagatgcgctggagatgctcgatcgtgaaggtaatccgattgaatcgcagttcaactacacgctggaaccggcacaatccagcttacccatgacgccgatgaccctgcggggcatgtatttttatatggctgatgcggcgaccttcactgattgcgcgaccggaaaacgttttattgtggcgaataacgcagagctggagcgtggctacctggctgcgcgcggtaacagtgaaaaaccagtgttactgtcagttgaaggtcactttacgctggaggctaatcccgataccggtgcgccgactaaagtattagcgcccgatacggcaggtaaattttacccaaaccaggattgcagtagtttggggctgtaacccgtcttgagacagaaacaaatgaaatattgcctcatgcgctgcgcttatcaggcctaaagcatacaatgcaatattttgaattagcacgattttgtaggccggataaggcgtttgaactgaaccccaaaacctggacagtttcagttaaccggctttttgatactcagtccggtattctaccgggctgagtcccccaagactgagttttattcttttttgattccagtaagttatgtattcgttaacggcattttccagctcttctacatttctgtagtcccggcgatagtacatttcttctttcaggtgaccaaagaagttctccattaccgcattatcaaggcagttgcccttgcgcgacatgctctgcactaaccctctgtccgccagggcggactgataactttttatccggtaatgccatccttgatcactgtggagcagcggtttctccccttcagcaaggctttccagacccttatttaacatccgcttcaccagctcttctgtaggcctgcaggccgtttcccacgccacgatttccccgttaaacaaatcaagtatcggggacaggtacagtttttgtccgccagccctgaattcggtgatatctgtcacccatttctcacagggagcttccgctttgaactgtcgctgaaggatattttctgcagcgagtcccatatttccccggtaagaccggtatttcttcaggcgcacaggagacttcaggccgagctgttgcatcagttttcgcaccgttttgccactgaacttaagacctcttttctgaagctcacaatggatccgccggtacccataacatccccggtgttcatggaagatggaggctatgagctgtttcacatcagcatacttgtccttagccttctgcagtgacagctggtagtacagcgtgcttctgccctgcggcctttaacaggtcagactggcagtgtccgtacctcaggctctggatgactttcgttttttctccagctcctggcgctttttttccagaagatgctcctgcatggctttcagatatgcattttctgcgcgaagataacgcagctcattcttcatctcttccggcgtcatgtttgcctcgttttcatgggtatcatcagaacgggtcatgcttttctccttcctgcgcctgataaaggcctcattaccagatttgcggtagccttttatccagtttttaaccgtgttgtggctgggaatgttaaaccgggcagctacccggggtagagactcagaatgcccgagagcataaagaaccacgcaaagtttatcttcaggagaatagctacgcttgtgtctgcaatccagtgcccgaggaccgtgaagaagaaaaagattaatccagtgtgagaggctggtgtgagaaagttgaaagagttttgccgtagaaatgatgcctgcatgaccagccaggtaatgatttacagcggcaagttttacttcaaatgaatgtttcataaactgcaccttcagatgtcagattatgtccaacatttggggtgcagttcagttcacgccgcatccggcattttgcgcacgaggctggcttttatcactgagtcagtccaacaaagcgacttgctttaatataaatccctggcttcaggtgcccaatatactgtaactgcgtttctggtttaaatgcagagacatcaccactacgcatatgcatcagatcggcagggctaatccagcctgattgcgccagcgtaagcggatgcccggctttggcaaatgcatcagtgacaaattccgaacaaaaccacgactttttgtctccttcgcccacactgcttaactgcgctttcgccaggccgctgacgcactgttgacgaaaatcctcggagaacggatttagtgagcacatctggcgaatcaccataaatggaataaattcgacaatgccgcgatagttataaccgctatctttgattttattggcgaacgcggtgatttctgtggcttgttgcggggtaaggtccgggactcgtaagacgaaaagcttatcactatgcttcatggcttttttaagggaaacaatctggacgccagcgcctgtcgcttcggcaacgttgttatctcccaaatagattgcaacgtgactcacagaggaagtgctgaatacgcggataccaaatgaggttaccccaaggcttgaggagaaaagcaaatcgccgggtttgagatctggttccgttatttcttttattgattgttcggtgaaagagctttgatgctggaatttaacagcccatgttttcgcctcggcatttaccactgtggctgatgagtctggctggctgatatcaacggtacaggacgaaagtaaaagaaagcaggggagaagcaggcggcagtacgcctttggtttatccattttatacaatccatgtaaaaaagggccccgaaattcaggaccctttctggcatcagcctttaatctgtttcaccagataatcgacgatgtcaccagtcttaattaactgtttctcgccgttacgacgatatttatattcgatatcatcgttgtcgaggttacggtcgcccagcacaatagtgtgcggaataccgatcagttccatatcagcaaacatcacgcccgggcgctctttgcggtcatccagcagcacttcgataccttgtgcgcgcagttcgctgtacagtttctcagcaagttcctgtacgcggaaggatttgtgcatgttcattggcagaatcgccacctggaacggcgcgatagcgtcaggccatacgatgccgcgttcgtcgtagttctgctcaatcgccgcagctaccacacgcgttacgccgataccgtagcaacccatcgtcaggatttggttacggccatcttcaccctgtacggaggctttcagtgcttcggagtacttggtacccagctggaagatgtgaccgacttcgataccacgtttgatcagcagcgtaccctgaccatccgggcttggatcgccagccaccacgttgcggatatcagcaatttccggagtagcgacatcgcgatcccagttgataccgaagtagtgtttaccatcgatgttagcaccagcagcgaaatcactcatcgccgcaacggtacggtcaatcaccaccggaatcggcatgtttaccggacccagtgaacccggaccggctttaaccacggcacgaatttcttcttcggtcgcaaaagtcagcgggctggcaacctgcggcagtttttctgctttaacttcgttcagctcgtggtcaccgcgcaccagcagcgcaaccagcgggaagctactgccttcaacggctttaaccagcagagtcttaaccgttttctcaatcggcagattgaactgttcaaccagttccgcgatggttttcgcgttcggcgtatcaaccagcgtcatttcctgggtagcagcagcgcgcggttctttcggcgcgatagcttctgccagttcaatgttcgctgcgtagtcagaagtatcggagaagaccacatcgtcttcaccgctctgcgccagcacctgaaattcgtgagaggcgctaccgccgatagaaccggtatcggcctgtacggcgcggaaatccagccccatgcggctgaagattttgctgtaggccgcatacattgcatcgtaggtttcctgcagggattcctgagaagtatggaaagagtaagcatctttcatcaggaattcgcgggaacgcatgacgccaaaacgcggacgcacttcgtcgcggaacttggtctggatctgatagaagttcagcggcagctgtttgtaagagctcagctcgttacgaatcaggtctgtaatcacttcttcatgagttgggccgagtacgaacggacggtcaccacggtcagcaatacgcagcaattccgggccatactgttcccaacgaccactctcttgccacagttcagatggctgaaccaccggcattaacacctcgatcgcaccggcgttgttcatctcttcacgcacgatgttttcgacttttttcagaacgcgcacgccggtcggcagccaggtatataacccggaggccagcttgcggatcatcccggcgcgcagcatcagctgatggctgatcacctcggcgtcggcaggtgtctccttgagagtggagagcaggtattggctagtacgcatgttgttacggttccagttggaaggtagaacaggctcaaggcgagcctgggacaaaaaaagtgatttagtttaccagtgcaaaagaaatgtcaaaagagaagggcgtgaatttaacgcggttccagcgcaaagacttcaaaacctgcgtcggtgacgcgccagcgaacgttaaaatcatgcagccagacggcataggttttgcccgtttcctcacctttacgataggccgggcgcgggtcctgcgccagtacttcgcggataaacagcgttaactgcggataacgcttctccagcgtcaaaagctgcttttcgacctctgcggtaaaacacaccgccatttctgccgctggcgcactttgcgcatagctggcactggcatcgggaagcgattcagcaaaggggagatacggtttgatatccactaccggcgtaccatcgaccagatccagactgccgagcttcagaatcacgctgtctttatggcaaacaacctccttcagctctaccagcgacataccaatcgggttagggcggaaagtggagcgcgtagcgaaaacacccattctggtattaccgccaagacgaggcggacgcacagtcggacgccagccgccttccatcgtttgatgaaagacgaaaaggatccataaatggctgaatgcttccaggccgcgaacggcgtcggcctggttgtagggagcaatgagatgtagttcgccgttggcgctttttaccagacctggctggcgcggaacggcgaatttttctttatagggcgagcgaataacgcctatttgctcgaactgaaaactgctcatttcgccgtgatgttaagcgcagaaccgatacatacagcctgacgatagcaacctggcgtaccgctggtaacttcgcagctatgcagtaataccgcattggctttcattttcgaggcgttgatttgcatccgcttacgtgcggttggaatgctcggcggagagtcctgattagaggcctggcaagagtcgccactgacttcaccgagatcgcggaacggtttgccgactaattcttctgcattggtataaattcggaccggcgtggcgcgcggcgctttcggttttgcaggctccgctttcggctggggtgcagtgctttgaacgggttcgacaggggatctgcttaacatggaacagccgcttagcatgagtgctactaaacagatcggtaaagcacgcatagtatttcctcaatgtatgatcaaaacgtcaatattgaatcaggcgcttgtaaaaatgacaagacgggcaagcgcccgtcctgaatgatattacaaattgtggaaacagcctaaatattaccagcctttaacagcgccgccgttaaacactttgtttgctgcttcgtaaacttcgtcagactgataagcctgaacgaatttcttcacgttttcggcgtctttgttgtcttcacgcgttacgatcaggtttacgtacggggactctttatcttcgacaaagataccgtctttcgctggagtcaggccaatctggctggcataggtggtattgataactgccagagcgatttgcgcgtcgtccagagagcgcggtagctgcggtgcttccagttcaacaattttcagattttttgggttctcaacaacatcaagaacggtcggcagcaggccaacgccatctttcagtttgatcaagcccactttttgcagcagcagcagtgaacgaccaaggttagttgggtcgtttggcacggcaacctgcgaaccatcctgcagttcatccagtgatttgattttcttggagtaaccagcaatcggataaacaaatgtgttgcctactgcgaccagtttgtagccacgatctttcagttgctgatcaaggtacggtttatgctggaaggcgttggcgtcgatatcgcctttgctcaatgcttcgtttggcagaacatagtcgttgaaggttaccagctcaacgtccaggccatatttgtctttcgcaactttctgcgcgacttctgcaacctgctgttcggcaccaacaatcacgccgactttaatgtggtttggatctttttcatcctgaccgcagcctaccagtgccagtgatccaatcagggctcccactgccgcaaaggttttgaatttgaacgccataccttattccttcttcaattatttatgttgtgttgaacgttacttgcgagtgacagcccggacgatgcggtcgcctgcgaactgaattaaataaaccagaatgaccagcaataccagtaccgtattcatcaccgtcgcgttgtagccgatgtagccatactgatagccaatctgacctaaaccaccggcaccgactgcaccacccatcgcggaataaccaaccagggtaatcagggtgatagttgccgcattcaccagacccggcaacgcttccggtaacagcactttacggacgatctgcattggcgtggcccccattgcgcgggaagcttcaattaacccggttgggatctccagcagagcgttctcgaccatacgggcaataaacggtgctgcaccaacggttaacggaacaatcgctgcctgcaatccaatcgatgtaccgacaataacgcgggtaaacggaatcatccataccagcaagataatgaacgggatggaacggaaaatgttcacaatcgcagaaatggtacgatacaacttcgcgttagcaataatttgccccggacgcgtgacataaagcagaacgccaaccggcagaccaatcacaaagccaaaaaaaccggatacgaaggtcattgccagcgtttcccatacgccacgaaccagcagccacatcatcggctcagacataacccagtacctctacttttacatggtgttcctgcagccaggcaatggcggcttgcgtatcttgttgtgtgccgtgcatttcagtcagcatgatgccgaacttaacgccaccggcgtaatccatctgcgcgctaataatgttgttgttgacgttgaaacgacgcgcggtttcagaaagcagtggggcatcgaccgattgaccggtaaactccagacgcagcatcggcacgcagtcagtaaatggctccgcttgcagacgttcctggtaatcttccgggatatccagatgcagggtcgactgaataaacttctgcgccagcggcgttttcggatgcgagaacacttcacttaccgtgtcctgctcgatcagttcgccattgctgatgaccgccacgcaatcacaaatgcgcttcacaacgtccatttcgtgagtgatcaacagaatcgtcaaacccagacggcggttgatgtctttcagcagttcgagaatagaacgtgtcgttgccgggtccagcgcgctggtggcttcatcacacagcaatactttgggattgctggctaatgcacgggcaatcgccacacgttgtttctgcccaccggaaagattcgacgggtagctatcatgcttatcgccaagaccaaccaatgacagcaattccgtcacgcgacgtttgatctcgtctttcggtgtgttgtccagctccagcggcagagccacgttgccaaaaacagtacgcgaagagagcaggttaaaatgctggaaaatcataccaatctggcgacgagctttggtcaactcggattctgacagcgtggtcagttcctggccatcgaccagcacgctaccctcggttgggcgctccagcaggtttacacaacgtataagcgtactcttacccgcgcctgaggcaccgataacgccataaatttgtccagctggcacatgcaggctgacgttgttcaacgcctggatggtgcgggtgccctggtggaacactttggtgatattcgaaagttttatcattgattatttattatcgtcattaagttagtcgtggcatttcgaatgcctggaacgggcaacgccgtcaatgaaatggatgttaaggcatccagacgtctaaatcaatcaggtttatgcgaagagcactttcttgcaggtcgaaacatgcgatactagcgtcacatgccttattaaggagctataaaaggtggcgaagagcgtacccgcaatttttcttgaccgtgatggcaccattaatgttgatcacggctatgtccatgagatcgacaactttgaatttatcgacggtgttattgacgccatgcgcgagctaaaaaaaatgggctttgcgctggtggtagtaaccaaccagtctggcattgctcgcggtaaatttactgaagcacagtttgaaacgctgaccgagtggatggactggtcgcttgcggaccgcgatgtcgatctggatggcatctattattgcccgcatcatccgcagggtagtgttgaagagtttcgccaggtctgcgactgccgcaaaccacatccggggatgtttttgtcagcacgcgattatttgcatattgatatggccgcttcttatatggtgggcgataaattagaagatatgcaggcagcggctgcggcgagcgtgggaacgaaagtgctggtgcgtacgggtaaacctattacgcctgaagcagaaaacgcggcggattgggtgttaaatagtctggcagacctgccgcaagcgataaaaaagcagcaaaaaccggcgtgatgattaaaagatgagcggttgaaataaaaatgcatttttccgcttgtcttcctgaaacgactccctataatgcgcctccatcgacacggcggatgtgaatcacttcacacaaacagccggttcggttgaagagaaaaatcctgaaattcagggttgactctgaaagaggaaagcgtaatatacgccacctcgcgacagtgagctgaaagccgcgtcgcaactgctctttaacaatttatcagacaatctgtgtgggcactcgaagatacggattcttgacgtcgcaagacgaaaaatgaataccaagtctcaggagtgaacacgtaattcattacgaagtttaattctttgagcatcaaacttttaaattgaagagtttgatcatggctcagattgaacgctggcggcaggcctaacacatgcaagtcgaacggtaacaggaatcagcttgctgatttgctgacgagtggcggacgggtgagtaatgtctgggaaactgcctgatggagggggataactactggaaacggtagctaataccgcataacgtcgcaagaccaaagagggggaccttcgggcctcttgccatcggatgtgcccagatgggattagctagtaggtggggtaaaggctcacctaggcgacgatccctagctggtctgagaggatgaccagccacactggaactgagacacggtccagactcctacgggaggcagcagtggggaatattgcacaatgggcgcaagcctgatgcagccatgccgcgtgtatgaagaaggccttcgggttgtaaagtactttcagcggggaggaagggagtaaagttaatacctttgctcattgacgttacccgcagaagaagcaccggctaactccgtgccagcagccgcggtaatacggagggtgcaagcgttaatcggaattactgggcgtaaagcgcacgcaggcggtttgttaagtcagatgtgaaatccccgggctcaacctgggaactgcatctgatactggcaagcttgagtctcgtagaggggggtagaattccaggtgtagcggtgaaatgcgtagagatctggaggaataccggtggcgaaggcggccccctggacgaagactgacgctcaggtgcgaaagcgtggggagcaaacaggattagataccctggtagtccacgccgtaaacgatgtcgacttggaggttgtgcccttgaggcgtggcttccggagctaacgcgttaagtcgaccgcctggggagtacggccgcaaggttaaaactcaaatgaattgacgggggcccgcacaagcggtggagcatgtggtttaattcgatgcaacgcgaagaaccttacctggtcttgacatccacggaagttttcagagatgagaatgtgccttcgggaaccgtgagacaggtgctgcatggctgtcgtcagctcgtgttgtgaaatgttgggttaagtcccgcaacgagcgcaacccttatcctttgttgccagcggtccggccgggaactcaaaggagactgccagtgataaactggaggaaggtggggatgacgtcaagtcatcatggcccttacgaccagggctacacacgtgctacaatggcgcatacaaagagaagcgacctcgcgagagcaagcggacctcataaagtgcgtcgtagtccggattggagtctgcaactcgactccatgaagtcggaatcgctagtaatcgtggatcagaatgccacggtgaatacgttcccgggccttgtacacaccgcccgtcacaccatgggagtgggttgcaaaagaagtaggtagcttaaccttcgggagggcgcttaccactttgtgattcatgactggggtgaagtcgtaacaaggtaaccgtaggggaacctgcggttggatcacctccttaccttaaagaagcgtactttgcagtgctcacacagattgtctgatgaaaatgagcagtaaaacctctacaggcttgtagctcaggtggttagagcgcacccctgataagggtgaggtcggtggttcaagtccactcaggcctaccaaatttgcaccgcaaatttgaagaggttttaactacatgttatggggctatagctcagctgggagagcgcctgctttgcacgcaggaggtctgcggttcgatcccgcatagctccaccatctctgtagtgattaaataaaaaatacttcagagtgtacctgcaaaggttcactgcgaagttttgctctttaaaaatctggatcaagctgaaaattgaaacactgaacaacgagagttgttcgtgagtctctcaaattttcgcaacacgatgatgaatcgcaagaaacatcttcgggttgtgaggttaagcgactaagcgtacacggtggatgccctggcagtcagaggcgatgaaggacgtgctaatctgcgataagcgtcggtgaggtgatatgaaccgttataaccggcgatttccgaatggggaaacccagtgtgtttcgacacactatcattaactgaatccataggttaatgaggcgaaccgggggaactgaaacatctaagtaccccgaggaaaagaaatcaaccgagattcccccagtagcggcgagcgaacggggaggagcccagagcctgaatcagtgtgtgtgttagtggaagcgtctggaaaggcgtgcgatacagggtgacagccccgtacacaaaaatgcacatattgtgagctcgatgagtagggcgggacacgtggtatcctgtctgaatatggggggaccatcctccaaggctaaatactcctgactgaccgatagtgaaccagtaccgtgagggaaaggcgaaaagaaccccggcgaggggagtgaaaaagaacctgaaaccgtgtacgtacaagcagtgggagcctcttaatggggtgactgcgtaccttttgtataatgggtcagcgacttatattctgtagcaaggttaaccgaataggggagccgaagggaaaccgagtcttaactgggcgttaagttgcagggtatagacccgaaacccggtgatctagccatgggcaggttgaaggttgggtaacactaactggaggaccgaaccgactaatgttgaaaaattagcggatgacttgtggctgggggtgaaaggccaatcaaaccgggagatagctggttctccccgaaagctatttaggtagcgcctcgtgaattcatctccgggggtagagcactgtttcggcaagggggtcatcccgacttaccaacccgatgcaaactgcgaataccggagaatgttatcacgggagacacacggcgggtgctaacgtccgtcgtgaagagggaaacaacccagaccgccagctaaggtcccaaagtcatggttaagtgggaaacgatgtgggaaggcccagacagccaggatgttggcttagaagcagccatcatttaaagaaagcgtaatagctcactggtcgagtcggcctgcgcggaagatgtaacggggctaaaccatgcaccgaagctgcggcagcgacactatgtgttgttgggtaggggagcgttctgtaagcctgtgaaggtggcctgtgagggttgctggaggtatcagaagtgcgaatgctgacataagtaacgataaagcgggtgaaaagcccgctcgccggaagaccaagggttcctgtccaacgttaatcggggcagggtgagtcgacccctaaggcgaggccgaaaggcgtagtcgatgggaaacaggttaatattcctgtacttggtgttactgcgaaggggggacggagaaggctatgttggccgggcgacggttgtcccggtttaagcgtgtaggctggttttccaggcaaatccggaaaaccaaggctgaggcgtgatgacgaggcactacggtgctgaagcgacaaatgccctgcttccagnaaaanccnnnaannnnnnggnaannnnaannnnnncccnaancnnnnnnngnngnnnngnnnnnnannncnangnnnntnnnnnnannnnggnnnangnannnngnnaaanngnnncnnnanntnnggnnnangnnnnnnnnnnntgtaggtgaagcgacttgctcgtggagctgaaatcagtcgaagataccagctggctgcaactgtttattaaaaacacagcactgtgcaaacacgaaagtggacgtatacggtgtgacgcctgcccggtgccggaaggttaattgatggggttagnggnaannnnaagctcttgatcgaagccccggtaaacggcggccgtaactataacggtcctaaggtagcgaaattccttgtcgggtaagttccgacctgcacgaatggcgtaatgatggccaggctgtctccacccgagactcagtgaaattgaactcgctgtgaagatgcagtgtacccgcggcaagacggaaagaccccgtgaacctttactatagcttgacactgaacattgagccttgatgtgtaggataggtgggaggctttgaagtgtggacgccagtctgcatggagccgaccttgaaataccaccctttaatgtttgatgttctaacgttggcccgtaatccgggttgcggacagtgtctggtgggtagtttgactggggcggtctcctcctaaagagtaacggaggagcacgaaggttggctaatcctggtcggacatcaggaggttagtgcaatggcataagccagcttgactgcgagcgtgacggcgcgagcaggtgcgaaagcaggtcatagtgatccggtggttctgaatggaagggccatcgctcaacggataaaaggtactccggggataacaggctgataccgcccaagagttcatatcgacggcggtgtttggcacctcgatgtcggctcatcacatcctggggctgaagtaggtcccaagggtatggctgttcgccatttaaagtggtacgcgagctgggtttagaacgtcgtgagacagttcggtccctatctgccgtgggcgctggagaactgaggggggctgctcctagtacgagaggaccggagtggacgcatcactggtgttcgggttgtcatgccaatggcactgcccggtagctaaatgcggaagagataagtgctgaaagcatctaagcacgaaacttgccccgagatgagttctccctgactccttgagggtcctgaaggaacgttgaagacgacgacgttgataggccgggtgtgtaagcgcagcgatgcgttgagctaaccggtactaatgaaccgtgaggcttaaccttacaacgccgaagatgttttggcggatgagagaagattttcagcctgatacagattagattaaccggcgacaagcgggttaatggaacagaatttgcctggcggccttagcgcggtggtcccacctgaccccatgccgaactcagaagtgaaacgccgtagcgccgatggtagtgtggggtctccccatgcgagagtagggaactgccaggcatcaaatttagcagtaagctggtcataaaaccggtggttgtaaaagaattcggtggagcggtagttcagtcggttagaatacctgcctgtcacgcagggggtcgcgggttcgagtcccgtccgttccgccacttattaagaagcctcgagttaacgctcgaggttttttttcgtttgtatttctattattgccaaaatcgcaaaaatcctctgcgttttacgccatttttccacaacagtctgaagcccataatcacctcagttaacgaaaatagcattaaaagaggcatattatggctatccctgcatttggtttaggcactttccgtctgaaagacgacgttgttatttcatctgtgaaaacggcgcttgaacttgattatcgcgcaattgataccgcacaaatctatgataacgaagccgcagtaggtcaggcgattgcagaaagtggcgtgccacgtcatgaactctacatcaccactaaaatctggattgaaaatctcagcaaagacaaattgatcccgagtctgaaagagagcctgcaaaaattgcgtaccgattatgttgatctgacgctaatccactggccgtcaccaagcgatgaagtctctgctgaagagtttatgcaggcgctgctggaagccaaaaaacaagggctgacgcgtgagatcggtatttccaacttcacgatcccattgatggaaaaagcgattgctgctgttggcgctgaaaacatcgctactaaccagattgaactctctccttatctgcaaaaccgtaaagtggtcgcctgggctaaacagcacggtatccatattacttcctatatgactctggcgtatggcaatgcactgaaagataaggttattgctcgtattgcagctaaacacaatgcgactccggctcaagtgattctggcgtgggctatgggggaaggttactcagtaattccttcttctactaaacgtgaaaacctggagagtaatcttaaggcacaaaatttacagcttgatgccgaagataaaaaagcgatcgccgcactggattgcaacgaccgcctggttagcccggaaggtctggctcctgaatgggattaagcctctctgacagctcctccgggagctgtttttacatgctcgctaaggaaatcgataaaagcccggatgcgcgtacttaccgcacggtcgctgtaatagactgcactgaatggcatttccactggcaacactttatctgccattaactccaccaattctccgcgagcgatttctttgtcgatcatgtagtcggacaaacacgcaatcccgttgccactcaggcaaagctgtttcagtgtttccccactattggatgacaaaccgtacttcacctcatgtaattgtccatcgctacaggctatcggccaggtattgagggaagcgggttcagtgaatctcaggcaaatatgttgctttaaatcgtcgatcgtttctggcttcccgtagcaggaaatataatcgggggaggcgataatttttcgataactgttaaataacggcctggcacgtaagctggaatccgttaacgtaccggcgcgtatcgcgacatccacttttctttcgatcaaattaataatcgtttcggaggagactagcgataaagtgacttccggatagcgttcacgaaaaggcttaatcaacggcatcagaaagtgcagcaccactggagttgcggcatcgatccgtaacagtccacgcggtgtattacgcgtctccataatttctgattctgccgctgccatctcctgcaaaattgactgtacgcgacgaaaataacgctcgccttcttccgtcaggctaagttgccgcgtggtccgattaagcaggctaacgccaagtttcatctccagctttttcaccgcccggcttaccgctgagtttgcttgccctaattgttccgctgcccggctaaagctgccgctttcgacgactgaaacaaaaatggcgagttcttccgacgtggctttcatttttgctcctgttgcaaaatagaagagatattttgaatttatttgtcattaaaccatcaggatgcgagatatgccatccgatttaatgttctcaataatgagcaaaatcctgaccggtgtaagcacttgcttacataacaatatacaattgctcgttgaaagagtgagctaaaatccctataacagtagaaccctcccgagtgcggaagggttgacgtgatagaggtttcaaagtcaaaagtgcgaaaaaacacctatgccatgcgctatgttgccggacaacctgcggaaaggatcttaccgccggggtcttttgcgagcatcggccaggcattaccacctggagaaccgttaagtaccgaagagcgtattcggatcctggtgtggaacatatacaaacagcaacgcgctgaatggttgtcggtattaaagaactacggcaaagatgcacatctggtgttattgcaggaagcgcagacaacgccagagttagtacagtttgcgaccgctaactatcttgccgccgatcaggtacccgctttcgtactgccacaacatccttctggcgtaatgaccctttcggcggcgcatccagtgtattgctgcccgttacgtgaacgagaacccattttgcgtctggcgaagtcggccctggtgacggtctatcccttacctgacactcgcctgttgatggtggttaatatacacgccgtcaatttcagtctgggcgtggatgtctatagtaagcagttacttcctattggcgatcagatagctcaccacagcggcccggtcattatggcgggagatttcaatgcctggagccgtagaaggatgaacgcgttatatcgctttgcgcgggaaatgtcgctgcgccaggtgcgttttactgatgatcagcgccgtcgggcgtttggccgcccgctcgattttgttttctaccgtggtctgaacgtcagcgaagcttctgtactggttacgcgcgcttccgatcacaatccgctactcgttgaattcagtcccggcaagcctgataaataaggtatgtcaggtctgccacagggcagaccaacgtttggcgctgcccttttatactcaaataacaaaaggacagcgcaatgacaacacaatcccaccatgaccacgtagaaaagcagtttagctctcaagccagcgaatatctgaccagtaccgtacatgcatccggacgagatttacagcgcctggcggtgcgtctggctgattatcctgatgcaagtgtacttgatatgggctgcggagcagggcatgccagctttgtcgctgcgcaaaacgtgagcacggtggtggcgtatgacttatctgcccatatgctggatgtcgtggcacaagctgccgaagcccggcaactgaaaaatatcaccacccgccagggttatgtcgaaagcctgccatttgccgataacgcatttgatattgttatcagccgttattctgcccatcactggcatgatgttggtgcagcactgcgtgaagtgaaccggatattgaaacttggcggtaagctgattgtgatggacgtaatgtctccgggccacccagtgcgcgacatctggttacagacggtagaagcattacgcgatatatctcacacacggaactacgccagcggtgagtggttgacgttaatcagtgaagccaatctgatagttgataatttaattacagataagttaccgctggaattttcttcatgggtagcgagaatgcgtacgccagaagcgttagtagacgctattcgcatttaccaacagagcgcatcgacagaggtgaaaacgtattttgccttgcagaatgatggctctttcaccagtgatatcatcatgctagaagcacataaagcggcataaataaaaaaggcaccgggggaatcggtgccttttttattatctggtttgtcaggaatctggcatgttgttgtttttcacaaacaacgtcagcttatcgcctggttgcagattcgcagtgtcgctgttccagcgcattacatctttgatgttcacgccgtggcgtttagcaatgcttgaaagcgaatcgcctttgcgcacacgatacgtaatgctatcgctgttgtttgccagtcgctgtgcgctactgcctgcaccaatcgtcaaactttggcctggcttcagcttagatccgcgcagtttgttccactgctgcaaatctttggtgcttacgccgagacgtgaagcgatacttgaaagcgtgtcgccagagcgtacggtgtaaacacggctgttaagcggcgtattgtcggcaaccagcgtcgactgtacagcagcaatttcgcctgaagccagagattcacgcagttgatctgcatgcttctttggcaccatcacgtactgcggaccacttgcgcccagcgtggagcctttcacgcctgcgttgaatgtcttcagcttgctgacggaaatccccgccatatctgcaaccttcgccatttcaaccgggctgctcaggtgcacacgcgccagagcacggctttcatcggtcgttggcagacgtacgccataacgcttgctgtttttgagaatatcactcaatgccagcattttaggcacgtactgcttcgtttcctgcggcaacggtaacgaccagaagtccgtggatttcccacgcgctttgttcgttttaattgccttcatgacccgaccttcgccgctgttataagccgctacggtcagaagccagtcgccgtcaaacatcttgttcagacgctgcatcatgttcagcgcggcagttgttgaagcaacaacatcgcgacgcgcgtcataattgcgtgtctgtttcaaaccataattgcgccccgtgctcggaatgatctgccagatgcccgcggcattggcgccagacgttgcgtgaggatcaaaagcgctctccactatgggtagtagtaccagttccataggcatgttacgttttttaacttgcccggctatccagtacatatacggctctgcccgtaaagttacatcgtggagatagctcttattgcgtaaatatttctgtttctgttcgcgaatccggtcgttttccggaattcccatctttagctcgtcgccaatgaaagcccacaagtcaccatctggcgcgatagacgtcccatcgtccatccatcgtgcctgacttgtaaactttgctgcttccccttgaccagctgcagaaaggctctgtgcgtgctgttgaacgttgccggtactctggcaacccacgagcaggacagaggcgagtaatatcgcttttgccttcatgtgtgtgtcaatagttgcttaaaagacgaccgatcataacggcgaacggagccgatgacaagaaagttttatcagaacctatctttctttgaccttaaccatgcaaaacgttcttcaggttgttgcaataatgtttcttcattaattacattaattaaatcaatatcttccgttcttaaaaaaacattaatttgccgctcatttttcagaattacgggtagtgttatttgattttttgcccgtaactccttaactttacgataataatcatttatggacaaatcgtgcggaagaatactcaaagcaaacttcatatttgataaggtatattcatgagcacaacataccaatgtatcgtcaggtaacgcacttaactttttaagtgattgatacatttgtgatggtgtcccttcaaacaaccgaccacacccaccagaaaacagcgtgtcgccgcaaaatagataaggtttactgaagtaacagatatgtcctaaagtgtgacccggtgtggcaattacactaaattcatgccccaaaacgaaggcagtttcgctatctttgactacctgtgttgttcccttatcttgtgtctcttgtggaccatacaccacaatttgcggaaactttttcaccagttcttttacgccgccaacgtgatcgtggtgatggtgggtgagaaatatggcctccggttgccagttattggcggcaatggcgtttaatactggctctgcgtctccgggatcgacaatcaggcagcgacctgcttcatcattcaaaacccagatgtaattgtcatcaaaggcgggaatactgttaagattcatagattacctctcagtgtgaaacggaaggttgtgatgaaaccggcaagagtccctcaaactgtcgtggctcctgattgctggggcgatttgccctggggagagctttatcgcaaggcgctggagcgtcagctcaacccgtggttcactaaaatgtatggttttcatctgcttaagattggcaatttaagcgcagaaatcaattgcgaagcgtgcgcggtttctcatcaagtgaatgtttctgcgcaaggaatgcccgtccaggtgcaggcggatccacttcatcttccttttgccgataaatccgttgatgtttgtctactggcacatacattgccgtggtgcactgatccgcatcgtttattgcgtgaagccgatcgggtactgattgatgatggctggctggtgattagtggcttcaatcccatcagtttaatgggattacgcaaacttgtgccggtattgcgcaaaacatcgccctataacagccggatgttcactctgatgcggcagctggactggctctctttgttgaattttgaagtgctacacgccagccgtttccacgttcttccgtggaacaaacacggaggaaaactattgaatgcgcatattcctgcgcttggttgcttacaacttattgttgcccggaaacggactattcctttaacgctaaatccgatgaaacagagcaagaataaaccgcgaattcgccaggcggttggtgccacccggcaatgtcgtaaaccacaggcttaaacttcgacttgatagcctgtatcttccagtgtgggattcattgccgcagcacgagccagttcatcacagcgttcgttttccgggtgtccggcatggcctttaacccattcccatttgatttgatgctgccccagagcagcatcaagacgttgccagagatcgacattttttactggttttttgtctgctgttttccagccacgttttttccagttatggatccacttggtgataccctggcggacatactggctgtcggtactcaaaatgacttcgcaatgttcttttaacgcctccagcgcgacaatagcggccatcaactccatacggttgttggtggtgcgggtgtagccagcgctaaaggttttctcgcgtccgcgatagcgtaaaatagcgccgtaacccccaggtcctggattacccagacacgaaccatcggtgaaaatttctacctgtttaagcatctctggtagacttcctgtaattgaatcgaactgtaaaacgacaagtctgacataaatgaccgctatgagcactgcaattacacgccagatcgttctcgataccgaaaccaccggtatgaaccagattggtgcgcactatgaaggccacaagatcattgagattggtgccgttgaagtggtgaaccgtcgcctgacgggcaataacttccatgtttatctcaaacccgatcggctggtggatccggaagcctttggcgtacatggtattgccgatgaatttttgctcgataagcccacgtttgccgaggtagccgatgagttcatggattatatccgcggcgcggagttggtgatccataacgcagcgtttgatatcggctttatggactacgagttttcgttgcttaagcgcgatattccgaagaccaataccttctgtaaggtcaccgatagccttgcggtggcgaggaaaatgtttcccggtaaacgcaacagcctcgatgcgttatgtgcccgctacgaaatagataacagtaaacgaacgctgcatggggcattactcgatgcccagatccttgcggaagtttatctggcgatgaccggtggtcaaacgtcgatggcttttgcgatggaaggagagacacaacagcaacaaggtgaaacaacaattcagcgcattgtgcgtcaggcaagtaagttacgcgttgtttttgcgacagatgaagagcttgcagcacatgaagcccgtctcgatctggtgcagaagaagggcggaagctgcctctggcgggcataaatacctgtaaaaggcgctaaaaatagcgacttgggcgatttttgcagcaaacgattcaaaagatgagaaaaaccgttgacgaagggtgaggcaatccgtaatattcgcctcgttcccaacggaacacaacgcggagcggtagttcagtcggttagaatacctgcctgtcacgcagggggtcgcgggttcgagtcccgtccgttccgccactattcgaggccatgctgttgattagcatggccttttatatgcttgttttttcggtatgccatccagtatgccattgccgtccggcttgcactggctcacctgaaatagcttcagacaactcactcacctctcatctcgctggcagtgctcccggattggtgtcgggcgatgatgttgttcagcttatcaatcagctcaggtcgcttgaatacgatttgtgcagttcccttctgaaaatacttaatcacaaacatctcatcctcatagtggttgctgtgccggttttcatgaatatggtctcccagccgacgggtaacgtcagcgcggttgtcgggaacaggcttcccgtcaaggatcatcagcattcgctcaaggtctgctaaccggtcacgctgtcagccatggttaagcccgaatccccaccggtcgaatttgaccagtcccgtcacaatgattttcgctccaaacccgcagggcgaattcgtcttaaaattccagcttaatcctttgaaaacgttaatgacgccacgctaaaacacctcacccttgttcaaatgcagttgcttaaaggtgctcagaatattcgcttcgctgaccaccggaatatcatccttttctaggctgttgtaccactggttacgggcctgagcgtccataatcgacagcatccctgagcgtttcattaaatcccgccatttaccgcgatcgagattgcgggtaatggctttcatcgctgtttcaggcttctccataagccagcaaccacagcgaaaatcctgtttcatgacccagtccagggcggtttttccgccgatactgagggtttgtgtcgaaatatcgttaatctggtggagcaatgcttcaatctgtgtcagcgccgcattacgtccggtgacgatgcgttcaatactggtggagcaaatcacatcggtatgatcggttaatacttcggggttggtgagagtaggttctgacattatttatttcctttatacaaagcaaagcgccagccggtgggggctggcacgtgtatgtgtgtaatgagtacggacagggagttaatctgtacgggtcttttgcagacgttgaaactgacacagctcgcgaacgtcctgacatgcacgttcaatccagggaaacagtactgccgaatctgttttatcctcatcgttgtcaaagataattcccgattcgcagtcgatattgttcgtaagcgtaaagccaatgccgtctgtaactcctgatccttgcagactaaattagagctccttctaaattagacggagttctattgatggataaacctacagactggcgctctgggacgcgccggatattttctaatgaatttaagcttcatatggttgaactggcttcgaaaccaaatgccaatgttgcacaactggcccgggaacatggcgttgataacaacctgatttttaaatggctacgtctctggcaaagagaaggacgtatttctcgtagaatgcctccaactattccattacggtaaaatgacactgggaaatccttcaccagagctgctcacggtgttgatccgtgaactgaccgggaggggaagatgatctcactcccatcaggtacccgcatctggctcgtggccggcgttaccgatatgcgtaaatccttcaacggtctgggagaacaggtacaacatgtgctggatgagacccccttctcaggtcacctgtttatctttcgtggccgacggggtgacactgttaaaatactctgggccgatgctgatggtctgtgcctgttcaccaaacgcctggaggaaggccagtttatctggcctgcggtgcgtgacggtaaggtatccattacccgctcgcaactggcaatgctcctcgataagctggactggcgtcagccaaaaacattccgccttaactcactgacaatgttgtaaaaaatgcctggccgcattataaaaacggccatgagtcagaaatacctcattcgcattgcagaactggaaagccagctccgtcagaaagaccagcaactgagtctggttgaagagacgaagaccttcctgcgctctgcactggcacgtgccgaagaaaagatcgaagaagatgaacgggaaatagaacatctgcgggctcagatagaaaaactgcgccggatgctgttcggtacctgttctgaaaaactgcgtcgtgaagttgaacaggctgaggccctgctgaaacaacgcgaacaggacagcgatcgttacagtgggcgggaagacgatccacaggttccccgccagttgcggcagtcgcgccatcgtcgtccgttcccggcacaccttccccgtgaaatacaccgtctggagtctgaagaaagctgttgcccggagtgtggcggtgagctggattatctgggggaagtcagtgcagaacaactggaactggtgagcagcgctctgaaagtgatccgcacagaacgggtaaaaaaagcctgtacaaaatgtgactgcatcgttgaagcaccggcgccgtcccgccgcgatagagcgtggtatcgcgggccccggattacttgcccgcgtgtttacgggaaaatactgcgaacacctgccactgtatcgtcagagtgaaatctttgcccgacagggtgtcgaactgagccgtgcattactctccaactgggttgacgcgtgctgccagttaatgacgccgctgaatgatgccctgtatcgttatgtgatgaatacccgcaagcttcacactgacgacacaccggtaaaggtactggcaccgggcctgaaaaagacgaaaacagggcgcatctggacgtatgtccgggatgatcgcaatgcgggttcgtcatctcctccggcggtctggttcgcgtactcaccgaacaggcaggggaaacacccggagcaacacctccgccccttccggggtatcctgcaggcggatgcgttcacaggttacgacaggctgttcagtgcagaacgcgaaggtggtgcgctgacagaagttgcgtgctgtgctcatgcccggagaaaaatccacgatgtatacatcagcagcaaaagtgcgatggcagaagaagccctgaagcgaatcagtgaactgtacgccatcgaggatgaaatacggggattaccagagtcagagcgtcttgcagtcaggcagcagcgaagcaaagcgttactgacgtcgctgcatgaatggatggtggagaagaatggcacgctgtcgaaaaaatccagactgggcgaagcgttcagctatgtactgaatcagtgggacgccctctgttattaccgtgatgacggtctggcggaggcggacaataacacagcggaaagagcgcttcgtgcagtctgtctcggaaagaaaaattcttatgacctttgtcaaatattaagcccaaaaagaccttacgcagctccgggagcttcgttatatcgcggattaaagaacctgaaacagtcagactgtatcttggattttacaaactcttattcggggattttagccccatgacgatttacgcagtgagctggcctctttctacgtgcaggtattagcgcattctggcttccctgaattcttttacgaggatcactcattccgtgtctgactgcttcagggtttaattttgcttctgctgactgaatgatgattgggcagcaagtgcaatatcccacataaatccagtcaactcacgagccaccgccgtaatggctacttgtgattttttcccttttgctgtcagacttcggtaacgagaacacaatcgttgttgagctttccatgcaatatctttggaatattgtgttacagagtccggtcggtaatatataagccatgccccaacttttgcaggtgtacgataagaccaggcggcttcgtaaagcagacgtctcagttcgctgtttccaacttttgttattcctctgggacgaatactgtttccactggaatattcacctggcaccagtcccagaaaagccatgagctgtttgggattggaaaatcgcgaaaaatcacccagttcagcaaccagagttattgcaattagctgaccaacacctttaagagcctgcaactggcagaccagattgcacagagaccactcaggtaacaggcgagatatttcctggtcgagttgaagtatgcgatcttcaatctgctccagactttgacaatagtgttgaaaagcaatctgttgagatggctgactaaatgattgattagctaaccaggttcgatgttttcctgtccagtgctttcctgcataatgtttgtctgttcgcaatagcatgctcagaattcgctgtcgggcaactctgctgtctcgtttagctgctgcacgggctctgattagatcccgcatagcttcatgagtcaggtcagggatccagacaggggtaagttctccagcccgcagtaacctggcgagagaaattgcgtcccgatgatcatttttgattctgtctgtcggtgattttggtatgcgggaaggggcaataacctggcattttatattcatcgctgtgagttgatgatatagcccaaaaccacaggggccagcctcatagcaggaaagaatgtttccgtaaagtccctgcaatttctgaaataatcgacgtacagcctgggcttcgttgttaatcgtaccataataacgaacttcgccaagccgttcaggtgcagcaatagcaaccgccaacgtttctttatgcacatccagcccgacgtaagccgcaatattttccgaatgcatgatgacctcctctggaatatcccaccaatgctatagtgagtatataaaggtcatatcatctacgtgttcttcggtagcgatcacggcggcgagcgtggagcactgctgtacgggctgatcggcacctgccgtctgaacggtatcgatccggaagcgtatctgcgccatattctacgtgttcttcggtagcgatcacggcggcgagcgtggagcactgctgtacgggctgatcggcacctgccgtctgaacggtatcgatccggaagcgtatctgcgccatattctgagcgtactgccggaatggccctccaaccgtgttgacgaactcctgccatggaacgtagttctcaccaataaataagcgtcaatacggtgctccgttgacgcttactattgttctgcagctaaatagctgcgcggaatagtagatcactttgagggaactcagcccggattgtgcgatctgatcaatcgccaaatcaaaacaaatcaccaaccggactgagcaatgccgatcatagcaccaatttcccgtgacgaacgacgcctgatgcagaaagccatccataaaacacacgataaaaattatgcccgcagactgactgccatgctgatgctgcaccggggcgaccgtgtcagcgacgttgccagaacgctctgctgcgcccgttcctctgttggacgctggattaactggttcacgcagtcgggtgttgagggactgaaatcattacctgccgggcgtgcccgtcgctggccgtttgagcatatctgcacactgttacgtgagctggtaaaacattctcccggcgactttggctaccagcgttcacgctggagtacagaactgctggcaataaaaatcaatgagataaccggttgccagttaaatgccggaaccgttcgccgctggttgccgtctgcggggattgtgtggcgaagggctgcgccaactctgcgtatccgtgacccgcataaagatgaaaagatggcagcaatccataaagcactggacgaatgctgcgcagagcatccggtcttttatgaagatgaagtggatatccatcttaatcccaaaatcggtgcggactggcaactgcgcggacagcaaaaacgggtggtcacgccgggacaggtaaagccagctatgtgggcggcaacagcaaaagttcggcgctgttcatcagcctgctgaaacggcttaaagcgacataccgtcgggcgaaaaccatcacgctgatcgtggacaactacattatccacaaaagccgggaaacacagagctggctgaaggagaacccgaagttcagggtcatttatcagccggtttactcgccatgggtgaatcatgttgaacggctatggcaggcacttcacgacacaataacgcgtaatcatcagtgccgctcaatgtggcaactgttgaaaaaagttcgccattttatggaaaccgttagcccattccccggaggcaaacatgggctggcaaaagtgtagcggtattaagcgcagctatttaggcaatcagaatttccagcgccgtttccgtgattaatgatgtcatgtcgttcctagttaccagtcgaaagtgggcaggcccggcagacatcctgcactggcagccagatgaatgagaccgacgccataacaccggatgagagtgacaaccagacgacggaacgtttttgacaggccaagacgtttaagccgcagaaccggatacgaccacgcatcagtacgtaacagataaccggtacctgtaaaatgaatccattctgattcgccgaagtcattcgtctgatgtgacagtgagtacagccaggcgttgtccttttccgtgatatgtgcggtactgcaacgaacgtatgtcggtaagggcagtaaacggtggtggagagtcggttgtctgctgttcgggagcatccaccacgcggagtgaataaccgttttcagcgaccttattattcaactcagcggggtcaataccatcgacgtcaacgacaattcgccccatgttcagtgcctgcacgttaacgctgtctgcttcgagcgtcagagtcagtttcatcgtttcgcctccgaatgttcaccccggatgatgtcgttcaccattctgtagttgctgcgggtcatcaggccggttgcccggcgggcccggaggatatcaatactgtttattaactgagaacgggtacaagcgctgaatcctggctggtcggtacgtaccagtgcgtatttttcaacgagaaagttcaccgcatcgcacagtgaaatgcctgcctcaatatgctgctcaatcacacgttcatcagcgaacggtgtgtcattcagtgtgaggccgtaatgctggtccaacagttgggtgagcagtgtctgccagatggtgacgggagacgggcagcgcgatgcctcccgtacgtgtgtgtcaggtaatgttttcatcttaagttctctgtaactggtagtgctaaaggtgagatattcggggttatgaggtggttgcgggtgccagtgtcggataaacagccatataaacgtaaccacagctgccgagggtgtcggcttcgcaggtcagccctctggcatacagcgtgacggtatgctgatggcggggattcagttcaccgatggtgagcatgagttccagttgtttcatcagcagtggaaaagcctggtccagatggtatgcatccgcgtcgctgaactgccctctgataccggcgcggtcggcaaggtaatgcaactgattgccctcctgcaccagacgtgccccgaaacagggcgtcacggtgcagggtagcccccaccaggggcggtcgttgttgtcgtcgggataatttgtttcatggagcgtgtctgacacgataaagtcctcacagaaaatcggtgaatgatagtttaacgatgacaggtcagccggcgtggagaccggcttcggtgaaggtatatgcattgatgtgaatggcctcatctacagcggcgtctgaggtcagccagtcgtactcgttttccagctggcggtacagccagaaggccaggtcgcgcagggcttcgctgacagcggcttccgcatcggctgtcagtgcctgaccagtcggactgttccgggtgacggtgatatccatgctgtacggatggcagtaacgtccccggtgactgatttcagcctgtaactgccagaagttacgcttctgtaccgcctgcagggcatccgcgatacgatgaagctcacggtcctgaggggcatattccctgattttccggggtgtcgctggctgccagtgccagcgcccttcaaaacaggctccgtccccctggctgcagaatccgctgaaccagatgcacggctcttccataaacctgccgttgctgagccggaaaacgcgctggcggaggtcaattccgaaaatgccacagacctccctgaagtcctcatacacgttttcataccagttgctgtcagcatgatgctgacggtaccagtcgcgggctttttcctgtgcggtggaggatagctcatgcagtgtatacacggtggtggtgataattctgctcatcagaatgcccttactgactcagttcagagtgacgctcatcagccggacatacgggccaaaactgtccttacggcgttcagcaaacacggccagcacaccgggaatatcctgcacttcacgaccggtatacgtttcagtgctgccgtgccagcggtatttgccggtacagaacggaaaaagacgggatgcaggatgctgttggtgaatacgcatggcttcaccacgggtgatgattttcataatgggatacctctgaagacagaagataaaagtgaaaacaggtgtgatgtggttgtgacgggttaaagcagaccatgttcggcaaaggagaaaacctggctgccaccgactatcagatggtccggcacccggatatccaccaggcccagtgcctgtaccagacgttccgtgataagccggtctgccttgctgggtgtgacttcaccggacgggtgattatgtgccagcaccacggctgcggcattgtgatacagggcgcgtttaatcacttcccggggatggacttccgtgcggttgatggtgccggtgaagagggtttcaccggcaatcagctgattctggttattcagatacagcacccggaactcttcacgctccagtcccgccatgttcagaatcagccattcccgtgccgcacgggtggaggtgaaggccacgccgggttcatgaagatggcggtccagggttttcagggcccgcagaatgaggctgcgctctctggttgtcatttctccgggcagaaaggaaagctgctgcattgtccctgcctccattcagtcgatgatgcgcataatggcgctgcattccggatgctgcagggcgtaatcccgcagacggtaataatgaaccgtcatggcataacactccgtacggcaggcgtgatgactgtacgtcatcagacaggcggcaatgccggcggcttccgggctcatttcagcgcggttaccgttcatggcattgaacagtacccatgtttcgtcatcatcgtcatccggttcaggggccataaatgccccgccgttgttcagggtgtacagattccagataccaccgcagtagttttcgcacagacggtccatccagccgaagacacggggctccagggtcacccactgtggaatgaggccaaaatgctgcggccagaagctgatgcgctgttcatcagggactatggtggcaaccagttgttgcaggccagtctccggtgcacaggccgaagaggtggtgttctgagacaatgttttcatgtatgaaatccttgtaatgtgaataaatgagagggagtaaaggtcgggagctggcaacatcacgttcatcactgaccgtgagacccggtaatatcagggatgaatgatattcggctgaaattccggacagccgtacgcgtaaccgttccggtcacagacggatggccagatgccattgcctgtactcagtctgcacagactgatttctccgggacggtaaagcagacgggtacaccaggcgcacaggtcatcatcagaaatggaacgacaccccggcagcgcctccggggcgtcgggtgattctggtgcctgaatcacgccttcagggacatgctgcatcagcgctggctctccagcagcgtttctgccattacccacaatgcgcggttgagcttaatatcggtgtcgatgctgtgaatggcacgggtgtggatacgttttccttttgcactgcgaccggaaatcccgcctttcagcatattctcctggatggtctgataagtactccacaggtccttaccgtaatcctcccggcgtcgtggcgtcagaatgtcggcggtggtgacgggccgatgttcgtcaccataacggtaagtcagtgccgcctgtgccagcgcctggcgtgccggtggcggcagaatcagcgactgcatggcatcacgcatctcctctatccggtcaaacacgcccaccacctcgtaagccccttcaatgactctgtccaccacatttccccggtgcggaacacgcacttcccccggagactgaccacagacgcatccgttctggcagacgaacctgaagtaacccggcagcatctggtagctggaggtaccgtcatgagagttgagcagaataatttcagggacatgttctccgtttatctctccgttacggcgcaggcgcagcatgtgttttgtgtatccccggcggcccgggtcgcgcacacaggtctggcaggcgaagaatggctgaaagccttcccgctgcaggctttccagtacggtgatggtggggatgtacgtatagttctggcttcgggacgtgtgtttctcttccccgaaaatccccggcacatggtgcatcagctcttcatgtgtcagtggacggtcacggcgtatctggttcgcagcataaccaaaacaactggctaatcgcatactttgctccttatcggtggttaagatttactggtgtaataaatgaaaaagccacgtctcccggagaagacgcagcctgatgggtgaaatgaatgacgtttattgtcttagaggaccgtcactggcgagccgcgtattaagcacctttccggcatcgggttcagaattccggcagcgccagcgtcgctgaccttccgcgttgcggataacccaacggaaatgcattcccgggtcatcctggataaacacattgcggtaagctgttatgacagcaacctcctgttcgcgtaagaaaggggcttcggaaaataagagtaatgtacagcccctcatgtgttttcacctgaaaataaaaagccccagccataatggcaggagcgaatttactattgattttaataatgcgcagataagacgcataattcctttaatagttttgttcgttatggattattcgagtggatagtcgcgatagtgccagtatttaccatcaacataaaaggtcaccttaccgcgacgtttaccctccctataaaacgtatcgaaattccaggtaacattcttgccagttgaatagctgccaccaacgacaacatcaccaaccattattgcatgaacaaccacgccataagcgttaagtctgcctttaccattgggggaattgaaagggattcggacaacgcttgctgcaccccaggggtcagtttgttcaacaaagcagagacctttaaagcgtaaacgtgcattacatgggaactggttacggttttgcgcgaactccacatattccgggaacggtgcacgacctttctcaggacgctttactaatgcggcgtcgctatcaggtacgatagtcatgaacaggaaagcaacaaagaacgttaaaatgtgtcggtgtttcatgataaaaatccttcttaaattattcgataccacggcttacggaatacgaccgattaattcggcgttatggcagaaatccatggtcgtataattatccgcggccagtagatgaatgctggcagacatgacttctggcggttcgcaagcgatgtccattaaacgtggacaggctttggctttttatcgctaataactagcccagtgcaggtatccccctgcatcagtttatacacttcgtgtttactgaagctatatattaacaccggtgactcgtccgggttaataattacagattcttcagttggttcgcagtgacggatatccgaaccaccgagtgcataagtgtcggtgatgccaatttcacagaaaagaatgatagtataaagtatagttttgattttcatttcactcacagttgcgaaaaggttgaatacttacagctccattctggcaagatattgtttgaaatcttcttgcgctttcattagatcacgacgttcggacttattcattctgctgaggatcgcatcattcacacattgcgcaggcaggcggagtaagacatgagtcttatgtttttgtctgatctcttttactttacgatccgattcaccaacaccatgagtatcgagcaccccggttcgaaagaactcgtcaagttcgttactttgcgcaaggtattgagtatcgacaaagacgtagtgacacgagtttttgttctcagcccaatacccgatctgaatatcagaccataaggcgtccttgttgtttagcaagtagaaagtcctggtttcgttgtcagcgacgaaaattatgctgctgtttttactacggtaaatcgtgtatctgttacccggataattcgcaatttcttcggccttatagaggagactgtttaaatattcttttttatacccggtttcgtttttccagcctgctttttctttgtaaaaccatactccctgcggaaaaccggtgatatcctcttcaaactgacccagcgattcggcagtcgcggtgatggaaatgagtaaaccgataaccagaattaaaaaatgtttcatttcatgcactccttaaataaatcgagggccaggaagtccccctctcctgtaatcgttattcgtaccaggtattccagcacgactggataaagttattatccatcactttcttaacgtttttggcagacgggttaaacgtcgcaactttcttctcgtttatgtacagttcaaacccggttgcagtgcttattgcttttacaaagctaacccaggcgttatcgttcatacgggtaccgtcaggaaccacaccccagaattcttcaccgtcaataacgaaactaatatttttttcttccgagtttgcgaccaccttatctcctttgtaaatatagattgtgtgcgccagcacattgttttcgttggggttacctgtgcaactgatattgataccccacttaccgttatcaatactgaactcagtaacgcccatcgtgaagccactgccccacatatttggaatagcgtgtgctacagatacggtcacagttaaaactacagccaggaaaatatttgacagtctcataattttctccccaaaattaaataaatcaatcttaaccatcgtccgggtaatatatatctgaaaatattttcaataacaccagccaggaaaaacaccaccacaggcggtggcgtttctttggggcgtctttatttaatccgggccatcgcgtttctcagtgccaaatctgcctcttccgttttctccagacttttctgcaacaccgcctctgaccgggtcagtgcctgacgcgcctccagtggtttccggatatgctccatcgccagcatcgtgtcttcatagccctgctgacgccaggtgtcgatatgtgccgatgtaaaactgagcagaccgccacttttgccttcttcccctgtttgtttcagctttttccggggacggatttcaaggattgtggtgtccggaaaagcccggcgatcccataaagaaccgtcactcagatgcgacacaatcaccatattgcatccggcatccaccagtggcgtcacaggggtattcccctgcatattttgccatccgcccataccaccatcaccgtacatttttccctgtacctcacggggacggaacagcaggggcagtgctgctgacgccagtaaggcttctttctgctgcccgtggggcaggctctggatatgctgaaaaacggagttttttgtagttccggtacccagttcagcacgaatgcagtcgataatatcctgcattcccccttccgtggggtacagcgacacatacaacggtagcccgtcagccagatcatcagtatcaagataatgatccatcagcactgtcaggggcccatctgacaacaacggctgagtcatcagattgtcaaacctgttgattgtcgatatatggtgaagaagcgtcgtaagcagtgcgcccgcacgtccggggagctggcagaggttcatggccgggagcagttttttcagcaatgaaaagtaaaccaatctgtttaccgacagcacctgattattccccagatgatcccagagcgcctccaggcgtacggcagcttctgacagatcgggagaggccgcgataatggcaccattgaatgcgccaatgctggcccctgaaaccatgctgatctgtgtaccacactctgccagtgccttaaccactcccgcctgataagcgcccaccgccccgccaccggacagcaccagccccgttttcatttctgtactcatgcagcccccttctgaaatatttcatcgaccatactttcagagaggcgttctgcagagcagaggcgaggcatgcgaaccggtaagtgttctgcagcctgcgtggttgaccagatcaccggatgctgctcttcactgcaccagtctcccagccagttaatcgcgtcatgccactcgttatctgcctgctcccggccctgaccaccaagccagtccagagtgttcagacgcacggttgcactaccgccactctcctgtgccatctgcgttaatgctttatgtctgagaatatccagtagctggttaacctggcctgtttcgccctgacgtatcacatcaccaaacgcgccccagcgaagctcttcaagtgccacataacaacgtccggcaggggaaaatgacgcgtatcgcccggcgctccaccatgagaatatctgctcaagatgtaactgcgcccgctgaacctggtcaacacggtggagtttttcttcaagatgattcagtttatggtgaacctgatcggccaggatgagtaactgctcccgtgtatctgcggaataatgcgccagcctggcagtatcactgaccagtgaactgaccctgtcgtttacccgggtaatcgcgtagtttgtggtggcaagtgacgttgtcagctccgtcagccagcgcagggacgcctcaacgccctgtgcaagcgaagcattgatggcattctgccgtgcagcgccttcgccggtcagtccctcttttaaacgccggaagaacgtgcgctctctggccgtgcggatatgctcctgtgcaacatcgattccgtttgcgaaatcaaccacaaatttttcaggaagacaggtgagtacctgacatacccggttatcagcaatttgttgaataaatggtgaagtcacagcattgtctccagctcttccctcagcgccttactgtcagtaatgagctcaggaaccctttcatttaatgcctgaagtctcccggtaagccgttcctgtgcctgctgatcgcgtttatgatcttcagagctctgaatcagcgtgttacgcagttgttcaactttctccctgaatgcgcagaaaaaggcatcgatttcctggcggacgggctggttaatatcctgctcaatggatgcctgcagctccccgaaatatgcccgggtcagtgacataacttcctctctgaccttgttgatattgatcacgctgcgactcacatcctcgtcatagttttcccagcccaggtcactggtgccaaaccatcgacaaacggttccccatngnnnnnnnnnnnnnnnnnnnnnnnnnnnnnnnnnnnnnnnnnnnnnnnnnnnnnnnnnnnnnnnnnnnnnnnnnnnnnnnnnnnnnnnnnnnnnnnnnnnnnnnnnnnnnnnnnnnnnnnnnnnnnnnnnnnnnnnnnnnnnnnnnnnnnnnnnnnnnnnnnnnnnnnnnnnnnnnnnnnnnnnnnnnnnnnnnnnnnnnnnnnnnnnnnnnnnnnnnnnnnnnnnnnnnnnnnnnnnnnnnnnnnnnnnnnnnnnnnnnnnnnnnnnnnnnnnnnnnnnnnnnnnnnnnnnnnnnnnnnnnnnnnnnnnnnnnnnnnnnnnnnnnnnnnnnnnnnnnnnnnnnnnnnnnnnnnnnnnnnnnnnnnnnnnnnnnnnnnnnnnnnnnnnnnnnnnnnnnnnnnnnnnnnnnnnnnnnnnnnnnnnnnnnnnnnnnnnnnnnnnnnnnnnnnnnnnnnnnnnnnnnnnnnnnnnnnnnnnnnnnnnnnnnnnnnnnnnnnnnnnnnnnnnnnnnnnnnnnnnnnnnnnnnnnnnnnnnnnnnnnnnnnnnnnnnnnnnnnnnnnnnnnnnnnnnnnnnnnnnnnnnnnnnnnnnnnnnnnnnnnnnnnnnnnnnnnnnnnnnnnnnnnnnnnnnnnnnnnnnnnnnnnnnnnnnnnnnnnnnnnnnnnnnnnnnnnnnnnnnnnnnnnnnnnnnnnnnnnnnnnnnnnnnnnnnnnnnnnnnnnnnnnnnnnnnnnnnnnnnnnnnnnnnnnnnnnnnnnnnnnnnnnnnnnnnnnnnnnnnnnnnnnnnnnnnnnnnnnnnnnnnnnnnnnnnnnnnnnnnnnnnnnnnnnnnnnnnnnnnnnnnnnnnnnnnnnnnnnnnnnnnnnnnnnnnnnnnnnnnnnnnnnnnnnnnnnnnnnnnnnnnnnnnnnnnnnnnnnnnnnnnnnnnnnnnnnnnnnnnnnnnnnnnnnnnnnnnnnnnnnnnnnnnnnnnnnnnnnnnnnnnnnnnnnnnnnnnnnnnnnnnnnnnnnnnnnnnnnnnnnnnnnnnnnnnnnnnnnnnnnnnnnnnnnnnnnnnnnnnnnnnnnnnnnnnnnnnnnnnnnnnnnnnnnnnnnnnnnnnnnnnnnnnnnnnnnnnnnnnnnnnnnnnnnnnnnnnnnnnnnnnnnnnnnnnnnnnnnnnnnnnnnnnnnnnnnnnnnnnnnnnnnnnnnnnnnnnnnnnnnnnnnnnnnnnnnnnnnnnnnnnnnnnnnnnnnnnnnnnnnnnnnnnnnnnnnnnnnnnnnnnnnnnnnnnnnnnnnnnnnnnnnnnnnnnnnnnnnnnnnnnnnnnnnnnnnnnnnnnnnnnnnnnnnnnnnnnnnnnnnnnnnnnnnnnnnnnnnnnnnnnnnnnnnnnnnnnnnnnnnnnnnnnnnnnnnnnnnnnnnnnnnnnnnnnnnnnnnnnnnnnnnnnnnnnnnnnnnnnnnnnnnnnnnnnnnnnnnnnnnnnnnnnnnnnnnnnnnnnnnnnnnnnnnnnnnnnnnnnnnnnnnnnnnnnnnnnnnnnnnnnnnnnnnnnnnnnnnnnnnnnnnnnnnnnnnnnnnnnnnnnnnnnnnnnnnnnnnnnnnnnnnnnnnnnnnnnnnnnnnnnnnnnnnnnnnnnnnnnnnnnnnnnnnnnnnnnnnnnnnnnnnnnnnnnnnnnnnnnnnnnnnnnnnnnnnnnnnnnnnnnnnnnnnnnnnnnnnnnnnnnnnnnnnnnnnnnnnnnnnnnnnnnnnnnnnnnnnnnntgaagacagaagataaaagtgaaaacaggtgtgatgtggttgtgacgggttaaagcagaccatattcggcaaaggagaaaacctggctgccaccgactatcagatggtccggcacccggatatccaccaggcccagtgcctgtaccagacgttccgtgataaggcggtctgccttgctgggtgtgacttcaccggacgggtgattgtgtgccagcaccacagcagcggcattgtgatacagggcgcgtttaatcacttcccggggatggacttccgtgcggttgatggtgccggtgaagagggtttcaccggcaatcagctgattctggttgttcagatacagcacccggaactcttcacgctccagtcccgccatgttcagaatcagccattctcgtgccgcacgggtggaggtgaaggccacgccgggttcatgaagatggcggtccagggttttcnnnnnnnnnnnnnnnnnnnnnnnnnnnnnnnnnnnnnnnnnnnnnnnnnnnnnnnnnnnnnnnnnnnnnnnnnnnnnnnnnnnnnnnnnnnnnnnnnnnnnnnnnnnnnnnnnnnnnnnnnnnnnnnnnnnnnnnnnnnnnnnnnnnnnnnnnnnnnnnnnnnnnnnnnnnnnnnnnnnnnnnnnnnnnnnnnnnnnnnnnnnnnnnnnnnnnnnnnnnnnnnnnnnnnnnnnnnnnnnnnnnnnnnnnnnnnnnnnnnnnnnnnnnnnnnnnnnnnnnnnnnnnnnnnnnnnnnnnnnnnnnnnnnnnnnnnnnnnnnnnnnnnnnnnnnnnnnnnnnnnnnnnnnnnnnnnnnnnnnnnnnnnnnnnnnnnnnnnnnnnnnnnnnnnnnnnnnnnnnnnnnnnnnnnnnnnnnnnnnnnnnnnnnnnnnnnnnnnnnnnnnnnnnnnnnnnnnnnnnnnnnnnnnnnnnnnnnnnnnnnnnnnnnnnnnnnnnnnnnnnnnnnnnnnnnnnnnnnnnnnnnnnnnnnnnnnnnnnnnnnnnnnnnnnnnnnnnnnnnnnnnnnnnnnnnnnnnnnnnnnnnnnnnnnnnnnnnnnnnnnnnnnnnnnnnnnnnnnnnnnnnnnnnnnnnnnnnnnnnnnnnnnnnnnnnnnnnnnnnnnnnnnnnnnnnnnnnnnnnnnnnnnnnnnnnnnnnnnnnnnnnnnnnnnnnnnnnnnnnnnnnnnnnnnnnnnnnnnnnnnnnnnnnnnnnnnnnnnnnnnnnnnnnnnnnnnnnnnnnnnnnnnnnnnnnnnnnnnnnnnnnnnnnnnnnnnnnnnnnnnnnnnnnnnnnnnnnnnnnnnnnnnnnnnnnnnnnnnnnnnnnnnnnnnnnnnnnnnnnnnnnnnnnnnnnnnnnnnnnnnnnnnnnnnnnnnnnnnnnnnnnnnnnnnnnnnnnnnnnnnnnnnnnnnnnnnnnnnnnnnnnnnnnnnnnnnnnnnnnnnnnnnnnnnnnnnnnnnnnnnnnnnnnnnnnnnnnnnnnnnnnnnnnnnnnnnnnnnnnnnnnnnnnnnnnnnnnnnnnnnnnnnnnnnnnnnnnnnnnnnnnnnnnnnnnnnnnnnnnnnnnnnnnnnnnnnnnnnnnnnnnnnnnnnnnnnnnnnnnnnnnnnnnnnnnnnnnnnnnnnnnnnnnnnnnnnnnnnnnnnnnnnnnnnnnnnnnnnnnnnnnnnnnnnnnnnnnnnnnnnnnnnnnnnnnnnnnnnnnnnnnnnnnnnnnnnnnnnnnnnnnnnnnnnnnnnnnnnnnnnnnnnnnnnnnnnnnnnnnnnnnnnnnnnnnnnnnnnnnnnnnnnnnnnnnnnnnnnnnnnnnnnnnnnnnnnnnnnnnnnnnnnnnnnnnnnnnnnnnnnnnnnnnnnnnnnnnnnnnnnnnnnnnnnnnnnnnnnnnnnnnnnnnnnnnnnnnnnnnnnnnnnnnnnnnnnnnnnnnnnnnnnnnnnnnnnnnnnnnnnnnnnnnnnnnnnnnnnnnnnnnnnnnnnnnnnnnnnnnnnnnnnnnnnnnnnnnnnnnnnnnnnnnnnnnnnnnnnnnnnnnnnnnnnnnnnnnnnnnnnnnnnnnnnnnnnnnnnnnnnnnnnnnnnnnnnnnnnnnnnnnnnnnnnnnnnnnnnnnnnnnnnnnnnnnnnnnnnnnnnnnnnnnnnnnnnnnnnnnnnnnnnnnnnnnnnnnnnnnnnnnnnnnnnnnnnnnnnnnnnnnnnnnnnnnnnnnnnnnnnnnnnnnnnnnnnnnnnnnannnnannnnnnnnnnnnnnnnnnnnnnnnnnnnnnnnnnnnnnnnnnnnnnnnnnnnnnnnnnnnnnnnnnnnnnnnnnnnnnnnnnnnnnnnnnnnnnnnnnnnnnnnnnnnnnnnnnnnnnnnnnnnnnnnnnnnnnnnnnnnnnnnnnnnnnnnnnnnnnnnnnnnnnnnnnnnnnnnnnnnnnnnnnnnnnnnnnnnnnnnnnnnnnnnnnnnnnnnnnnnnnnnnnnnnnnnnnnnnnnnnnnnnnnnnnnnnnnnnnnnnnnnnnnnnnnnnnnnnnnnnnnnnnnnnnnnnnnnnnnnnnnnnnnnnnnnnnnnnnnnnnnnnnnnnnnnnnnnnnnnnnnnnnnnnnnnnnnnnnnnnnnnnnnnnnnnnnnnnnnnnnnnnnnnnnnnnnnnnnnnnnnnnnnnnnnnnnnnnnnnnnnnnnnnnnnnnnnnnnnnnnnnnnnnnnnnnnnnnnnnnnnnnnnnnnnnnnnnnnnnnnnnnnnnnnnnnnnnnnnnnnnnnnnnnnnnnnnnnnnnnnnnnnnnnnnnnnnnnnnnnnnnnnnnnnnnnnnnnnnnnnnnnnnnnnnnnnnnnnnnnnnnnnnnnnnnnnnnnnnnnnnnnnnnnnnnnnnnnnnnnnnnnnnnnnnnnnnnnnnnnnnnnnnnnnnnnnnnnnnnnnnnnnnnnnnnnnnnnnnnnnnnnnnnnnnnnnnnnnnnnnnnnnnnnnnnnnnnnnnnnnnnnnnnnnnnnnnnnnnnnnnnnnnnnnnnnnnnnnnnnnnnnnnnnnnnnnnnnnnnnnnnnnnnnnnnnnnnnnnnnnnnnnnnnnnnnnnnnnnnnnnnnnacaaagaacgttaaaatgtgtcggtgtttcatgataaaaatccttcttaaattattcgataccacggcttacggaatacgaccgattaattcggcgttatggcagaaatccatggtcgtataattatccgcggccagtagatgaatgctggcagacatgacttctggcggttcgcaagcgatgtccattaaacgtggacaggctttggctttttatcgctaataactagcccagtgcaggtatccccctgcatcagtttatacacttcgtgtttactgaagctatatattaacaccggtgactcgtccgggttaataattacagattcttcagttggttcgcagtgacggatatccgaaccaccgagtgcataagtgtcggtgatgccaatttcacagaaaagaatgatagtataaagtatagttttgattttcatttcactcacagttgcgaaaaggttgaatacttacagctccattctggcaagatattgtttgaaatcttcttgcgctttcattagatcacgacgttcggacttattcattctgctgaggatcgcatcattcacacattgcgcaggcaggcggagtaagacatgagtcttatgtttttgtctgatctcttttactttacgatccgattcaccaacaccatgagtatcgagcaccccggttcgaaagaactcgtcaagttcgttactttgcgcaaggtattgagtatcgacaaagacgtagtgacacgagtttttgttctcagcccaatacccgatctgaatatcagaccataaggcgtccttgttgtttagcaagtagaaagtcctggtttcgttgtcagcgacgaaaattatgctgctgtttttactacggtaaatcgtgtatctgttacccggataattcgcaatttcttcggccttatagaggagactgtttaaatattcttttttatacccggtttcgtttttccagcctgctttttctttgtaaaaccatactccctgcggaaaaccggtgatatcctcttcaaactgacccagcgattcggcagtcgcggtgatggaaatgagtaaaccgataaccagaattaaaaaatgtttcatttcatgcactccttaaataaatcgagggccaggaannnnnnnnnnnnnnnnnnnnnnnnnnnnnnnnnnnnnnnnnnnnnnnnnnnnnnnnnnnnnnnnnnnnnnnnnnnnnnnnnnnnnnnnnnnnnnnnnnnnnnnnnnnnnnnnnnnnnnnnnnnnnnnnnnnnnnnnnnnnnnnnnnnnnnnnnnnnnnnnnnnnnnnnnnnnnnnnnnnnnnnnnnnnnnnnnnnnnnnnnnnnnnnnnnnnnnnnnnnnnnnnnnnnnnnnnnnnnnnnnnnnnnnnnnnnnnnnnnnnnnnnnnnnnnnnnnnnnnnnnnnnnnnnnnnnnnnnnnnnnnnnnnnnnnnnnnnnnnnnnnnnnnnnnnnnnnnnnnnnnnnnnnnnnnnnnnnnnnnnnnnnnnnnnnnnnnnnnnnnnnnnnnnnnnnnnnnnnnnnnnnnnnnnnnnnnnnnnnnnnnnnnnnnnnnnnnnnnnnnnnnnnnnnnnnnnnnnnnnnnnnnnnnnnnnnnnnnnnnnnnnnnnnnnnnnnnnnnnnnnnnnnnnnnnnnnnnnnnnnnnnnnnnnnnnnnnnnnnnnnnnnnnnnnnnnnnnnnnnnnnnnnnnnnnnnnnnnnnnnnnnnnnnnnnnnnnnnnnnnnnnnnnnnnnnnnnnnnnnnnnnnnnnnnnnnnnnnnnnnnnnnnnnnnnnnnnnnnnnnnnnnnnnnnnnnnnnnnnnnnnnnnnnnnnnnnnnnnnnnnnnnnnnnnnnnnnnnnnnnnnnnnnnnnnnnnnnnnnnnnnnnnnnnnnnnnnnnnnnnnnnnnnnnnnnnnnnnnnnnnnnnnnnnnnnnnnnnnnnnnnnnnnnnnnnnnnnnnnnnnnnnnnnnnnnnnnnnnnnnnnnnnnnnnnnnnnnnnnnnnnnnnnnnnnnnnnnnnnnnnnnnnnnnnnnnnnnnnnnnnnnnnnnnnnnnnnnnnnnnnnnnnnnnnnnnnnnnnnnnnnnnnnnnnnnnnnnnnnnnnnnnnnnnnnnnnnnnnnnnnnnnnnnnnnnnnnnnnnnnnnnnnnnnnnnnnnnnnnnnnnnnnnnnnnnnnnnnnnnnnnnnnnnnnnnnnnnnnnnnnnnnnnnnnnnnnnnnnnnnnnnnnnnnnnnnnnnnnnnnnnnnnnnnnnnnnnnnnnnnnnnnnnnnnnnnnnnnnnnnnnnnnnnnnnnnnnnnnnnnnnnnnnnnnnnnnnnnnnnnnnnnnnnnnnnnnnnnnnnnnnnnnnnnnnnnnnnnnnnnnnnnnnnnnnnnnnnnnnnnnnnnnnnnnnnnnnnnnnnnnnnnnnnnnnnnnnnnnnnnnnnnnnnnnnnnnnnnnnnnnnnnnnnnnnnnnnnnnnnnnnnnnnnnnnnnnnnnnnnnnnnnnnnnnnnnnnnnnnnnnnnnnnnnnnnnnnnnnnnnnnnnnnnnnnnnnnnnnnnnnnnnnnnnnnnnnnnnnnnnnnnnnnnnnnnnnnnnnnnnnnnnnnnnnnnnnnnnnnnnnnnnnnnnnnnnnnnnnnnnnnnnnnnnnnnnnnnnnnnnnnnnnnnnnnnnnnnnnnnnnnnnnnnnnnnnnnnnnnnnnnnnnnnnnnnnnnnnnnnnnnnnnnnnnnnnnnnnnnnnnnnnnnnnnnnnnnnnnnnnnnnnnnnnnnnnnnnnnnnnnnnnnnnnnnnnnnnnnnnnnnnnnnnnnnnnnnnnnnnnnnnnnnnnnnnnnnnnnnnnnnnnnnnnnnnnnnnnnnnnnnnnnnnnnnnnnnnnnnnnnnnnnnnnnnnnnnnnnnnnnnnnnnnnnnnnnnnnnnnnnnnnnnnnnnnnnnnnnnnnnnnnnnnnnnnnnnnnnnnnnnnnnnnnnnnnnnnnnnnnnnnnnnnnnnnnnnnnnnnnnnnnnnnnnnnnnnnnnnnnnnnnnnnnnnnnnnnnnnnnnnnnnnnnnnnnnnnnnnnnnnnnnnnnnnnnnnnnnnnnnnnnnnnnnnnnnnnnnnnnnnnnnnnnnnnnnnnnnnnnnnnnnnnnnnnnnnnnnnnnnnnnnnnnnnnnnnnnnnnnnnnnnnnnnnnnnnnnnnnnnnnnnnnnnnnnnnnnnnnnnnnnnnnnnnnnnnnnnnnnnnnnnnnnnnnnnnnnnnnnnnnnnnnnnnnnnnnnnnnnnnnnnnnnnnnnnnnnnnnnnnnnnnnnnnnnnnnnnnnnnnnnnnnnnnnnnnnnnnnnnnnnnnnnnnnnnnnnnnnnnnnnnnnnnnnnnnnnnnnnnnnnnnnnnnnnnnnnnnnnnnnnnnnnnnnnnnnnnnnnnnnnnnnnnnnnnnnnnnnnnnnnnnnnnnnnnnnnnnnnnnnnnnnnnnnnnnnnnnnnnnnnnnnnnnnnnnnnnnnnnnnnnnnnnnnnnnnnnnnnnnnnnnnnnnnnnnnnnnnnnnnnnnnnnnnnnnnnnnnnnnnnnnnnnnnnnnnnnnnnnnnnnnnnnnnnnnnnnnnnnnnnnnnnnnnnnnnnnnnnnnnnnnnnnnnnnnnnnnnnnnnnnnnnnnnnnnnnnnnnnnnnnnnnnnnnnnnnnnnnnnnnnnnnnnnnnnnnnnnnnnnnnnnnnnnnnnnnnnnnnnnnnnnnnnnnnnnnnnnnnnnnnnnnnnnnnnnnnnnnnnnnnnnnnnnnnnnnnnnnnnnnnnnnnnnnnnnnnnnnnnnnnnnnnnnnnnnnnnnnnnnnnnnnnnnnnnnnnnnnnnnnnnnnnnnnnnnnnnnnnnnnnnnnnnnnnnnnnnnnnnnnnnnnnnnnnnnnnnnnnnnnnnnnnnnnnnnnnnnnnnnnnnnnnnnnnnnnnnnnnnnnnnnnnnnnnnnnnnnnnnnnnnnnnnnnnnnnnnnnnnnnnnnnnnnnnnnnnnnnnnnnnnnnnnnnnnnnnnnnnnnnnnnnnnnnnnnnnnnnnnnnnnnnnnnnnnnnnnnnnnnnnnnnnnnnnnnnnnnnnnnnnnnnnnnnnnnnnnnnnnnnnnnnnnnnnnnnnnnnnnnnnnnnnnnnnnnnnnnnnnnncaccaggcgcacaggtcatcatcagaaatggaacgacaccccggcagcgcctccggggcgtcgggtgattctggtgcctgaatcacgccttcagggacatgctgcatcagcgctggctctccagcagcgtttctgccattacccacaatgcgcggttgagcttaatatcggtgtcgatgctgtgaatggcacgggtgtggatacgttttccttttgcactgcgaccggaaatcccgcctttcagcatattctcctggatggtctgataagtactccacaggtccttaccgtaatcctcccggcgtcgtggcgtcagaatgtcggcggtggtgacgggccgatgttcgtcaccataacggtaagtcagtgccgcctgtgccagcgcctggcgtgccggtggcggcagaatcagcgactgcatggcatcacgcatctcctctatccggtcaaacacgcccaccacctcgtaagccccttcaatgactctgtccaccacatttccccggtgcggaacacgcacttcccccggagactgaccacagacgcatccgttctggcagacgaacctgaagtaacccggcagcatctggtagctggaggtaccgtcatgagagttgagcagaataatttcagggacatgttctccgtttatctctccgttacggcgcaggcgcagcatgtgttttgtgtatccccggcggcccgggtcgcgcacacaggtctggcaggcgaagaatggctgaaagccttcccgctgcaggctttccagtacggtgatggtggggatgtacgtatagttctggcttcgggacgtgtgtttctcttccccgaaaatccccggcacatggtgcatcagctcttcatgtgtcagtggacggtcacggcgtatctggttcgcagcataaccaaaacaactggctaatcgcatactttgctccttatcggtggttaagatttactggtgtaataaatgaaaaagccacgtctcccggagaagacgcagcctgatgggtgaaatgaatgacgtttattgtcttagaggaccgtcactggcgagccgcgtattaagcacctttccggcatcgggttcagaattccggcagcgccagcgtcgctgaccttccgcgttgcggataacccaacggaaatgcattcccgggtcatcctggataaacacattgcggtaagctgttatgacagcaacctcctgttcgcgtaagaaaggggcttcggaaaataagagtaatgtacagcccctcatgtgttttcacctgaaaataaaaagccccagccataatggcaggagcgaatttactattgattttaataatgcgcagataagacgcataattcctttaatagttttgttcgttatggattattcgagtggatagtcgcgatagtgccagtatttaccatcaacataaaaggtcaccttaccgcgacgtttaccctccctataaaacgtatcgaaattccaggtaacattcttgccagttgaatagctgccaccaacgacaacatcaccaaccattattgcatgaacaaccacgccataagcgttaagtctgcctttaccattgggggaattgaaagggattcggacaacgcttgctgcaccccaggggtcagtttgttcaacaaagcagagacctttaaagcgtaaacgtgcattacatgggaactggttacggttttgcgcgaactccacatattccgggaacggtgcacgacctttctcaggacgctttactaatgcggcgtcgctatcaggtacgatagtcatgaacaggaaagcaacaaagaacgttaaaatgtgtcggtgtttcatgataaaaatccttcttaaattattcgataccacggcttacggaatacgaccgattaattcggcgttatggcagaaatccatggtcgtataattatccgcggccagtagatgaatgctggcagacatgacttctggcggttcgcaagcgatgtccattaaacgtggacaggctttggctttttatcgctaataactagcccagtgcaggtatccccctgcatcagtttatacacttcgtgtttactgaagctatatattaacaccggtgactcgtccgggttaataattacagattcttcagttggttcgcagtgacggatatccgaaccaccgagtgcataagtgtcggtgatgccaatttcacagaaaagaatgatagtataaagtatagttttgattttcatttcactcacagttgcgaaaaggttgaatacttacagctccattctggcaagatattgtttgaaatcttcttgcgctttcattagatcacgacgttcggacttattcattctgctgaggatcgcatcattcacacattgcgcaggcaggcggagtaagacatgagtcttatgtttttgtctgatctcttttactttacgatccgattcaccaacaccatgagtatcgagcaccccggttcgaaagaactcgtcaagttcgttactttgcgcaaggtattgagtatcgacaaagacgtagtgacacgagtttttgttctcagcccaatacccgatctgaatatcagaccataaggcgtccttgttgtttagcaagtagaaagtcctggtttcgttgtcagcgacgaaaattatgctgctgtttttactacggtaaatcgtgtatctgttacccggataattcgcaatttcttcggccttatagaggagactgtttaaatattcttttttatacccggtttcgtttttccagcctgctttttctttgtaaaaccatactccctgcggaaaaccggtgatatcctcttcaaactgacccagcgattcggcagtcgcggtgatggaaatgagtaaaccgataaccagaattaaaaaatgtttcatttcatgcactccttaaataaatcgagggccaggaagtccccctctcctgtaatcgttattcgtaccaggtattccagcacgactggataaagttattatccatcactttcttaacgtttttggcagacgggttaaacgtcgcaactttcttctcgtttatgtacagttcaaacccggttgcagtgcttattgcttttacaaagctaacccaggcgttatcgttcatacgggtaccgtcaggaaccacaccccagaattcttcaccgtcaataacgaaactaatatttttttcttccgagtttgcgaccaccttatctcctttgtaaatatagattgtgtgcgccagcacattgttttcgttggggttacctgtgcaactgatattgataccccacttaccgttatcaatactgaactcagtaacgcccatcgtgaagccactgccccacatatttggaatagcgtgtgctacagatacggtcacagttaaaactacagccaggaaaatatttgacagtctcataattttctccccaaaattaaataaatcaatcttaaccatcgtccgggtaatatatatctgaaaatattttcaataacaccagccaggaaaaacaccaccacaggcggtggcgtttctttggggcgtctttatttaatccgggccatcgcgtttctcagtgccaaatctgcctcttccgttttctccagacttttctgcaacaccgcctctgaccgggtcagtgcctgacgcgcctccagtggtttccggatatgctccatcgccagcatcgtgtcttcatagccctgctgacgccaggtgtcgatatgtgccgatgtaaaactgagcagaccgccacttttgccttcttcccctgtttgtttcagctttttccggggacggatttcaaggattgtggtgtccggaaaagcccggcgatcccataaagaaccgtcactcagatgcgacacaatcaccatattgcatccggcatccaccagtggcgtcacaggggtattcccctgcatattttgccatccgcccataccaccatcaccgtacatttttccctgtacctcacggggacggaacagcaggggcagtgctgctgacgccagtaaggcttctttctgctgcccgtggggcaggctctggatatgctgaaaaacggagttttttgtagttccggtacccagttcagcacgaatgcagtcgataatatcctgcattcccccttccgtggggtacagcgacacatacaacggtagcccgtcagccagatcatcagtatcaagataatgatccatcagcactgtcaggggcccatctgacaacaacggctgagtcatcagattgtcaaacctgttgattgtcgatatatggtgaagaagcgtcgtaagcagtgcgcccgcacgtccggggagctggcagaggttcatggccgggagcagttttttcagcaatgaaaagtaaaccaatctgtttaccgacagcacctgattattccccagatgatcccagagcgcctccaggcgtacggcagcttctgacagatcgggagaggccgcgataatggcaccattgaatgcgccaatgctggcccctgaaaccatgctgatctgtgtaccacactctgccagtgccttaaccactcccgcctgataagcgcccaccgccccgccaccggacagcaccagccccgttttcatttctgtactcatgcagcccccttctgaaatatttcatcgaccatactttcagagaggcgttctgcagagcagaggcgaggcatgcgaaccggtaagtgttctgcagcctgcgtggttgaccagatcaccggatgctgctcttcactgcaccagtctcccagccagttaatcgcgtcatgccactcgttatctgcctgctcccggccctgaccaccaagccagtccagagtgttcagacgcacggttgcactaccgccactctcctgtgccatctgcgttaatgctttatgtctgagaatatccagtagctggttaacctggcctgtttcgccctgacgtatcacatcaccaaacgcgccccagcgaagctcttcaagtgccacataacaacgtccggcaggggaaaatgacgcgtatcgcccggcgctccaccatgagaatatctgctcaagatgtaactgcgcccgctgaacctggtcaacacggtggagtttttcttcaagatgattcagtttatggtgaacctgatcggccaggatgagtaactgctcccgtgtatctgcggaataatgcgccagcctggcagtatcactgaccagtgaactgaccctgtcgtttacccgggtaatcgcgtagtttgtggtggcaagtgacgttgtcagctccgtcagccagcgcagggacgcctcaacgccctgtgcaagcgaagcattgatggcattctgccgtgcagcgccttcgccggtcagtccctcttttaaacgccggaagaacgtgcgctctctggccgtgcggatatgctcctgtgcaacatcgattccgtttgcgaaatcaaccacaaatttttcaggaagacaggtgagtacctgacatacccggttatcagcaatttgttgaataaatggtgaagtcacagcattgtctccagctcttccctcagcgccttactgtcagtaatgagctcaggaaccctttcatttaatgcctgaagtctcccggtaagccgttcctgtgcctgctgatcgcgtttatgatcttcagagctctgaatcagcgtgttacgcagttgttcaactttctccctgaatgcgcagaaaaaggcatcgatttcctggcggacgggctggttaatatcctgctcaatggatgcctgcagctccccgaaatatgcccgggtcagtgacataacttcctctctgaccttgttgatattgatcacgctgcgactcacatcctcgtcatagttttcccagcccaggtcactggtgccaaaccatcgacaaacggttccccatacgccactctgccgacggcgacgggtgacggtctccgttctttcctccataagcgcactcagatttgtttttaccgcgagccgggtctgtaactgactgactgccggaaaactgatttttacggtaaagccctcatcctccaggcgggcattgatgcgaccggcaatgttttctgtggcgtacagggccgtgccacgaaaacctgtttcaatcccgctgacgattttctccagctcaggccggaactgtgcttcagcctcacggtgcaggctggtcacagttgactcaatttcctctatatattcaattgcttccctgcgattatttagtgttatctcggggttttccgggtcaaagtctcgtttcctgtaatcttcccagcccgggttgttgataccggaccattgagaaatctttccccataatccggaccgggaccttcgttgttctgcgtcttcttcctccaacatttgctgttctttgcgtttaccagttctgaaatagtcattcagctcctcttccagtgaggtgcagacccccgtcagtaattcccgggttctggcatcgatctcctccatggccattctgacatcagcggtcacctgctcctgacagtccgcgattttccggatatccgcaagcaggctggtgatattcgcctgcagtgactgaatgctttgctgcagcccctgatggcgtaatgacagatattcgctgacattttctgcattctgcatcagttttgcggcagcagaatcaaccgccagtgccgccgctctggagtgtgaactcagtatgacttccgttatcagttgatcgataagtgagccttcccacaggtctgtcgccccttcagttgccagttcgctgtctttacagacgtaatcttttttcatgcgaccgaaggcttccctgacaaaatcatcgacccaggcttcatcaacaggaagggttccgtttttccgtaactcatgaagcgcacggttagccaggtatgcctggcgtgaggatccgggataaacgcgggaggcgggcagcacatcgctgttcagcattgccggaactttctggcgtacggcatctgccccatcgccattgcggtctttctcatcaaatttattgaccagtacaaacaggcggccggctgatacgtcagcaatggcattaagctctttacggacgtcttcatccgcttttgagttcatctgggtgtaatccatcacagccagaaccgcagaggctttctgcagttgatcccgcatcatcacttccatctgcggttgtccggcctcattagggccgggggtatccagcagtgtgagtgttccctggcatgcatccatccccaccagatggctgaattccacgtcgatcaccggcagtttctgcacttctgcgtattcatcaaaaggaaattcagtccccattgccgcagcaagacgaaccagatcgtttaacgatgccagtccggtaaagatttcctcctccccgtggtattcatttttgagccagccatcatccgtcagaatatccagcagttcgcgggtatccccggtttgctgcagggtctgtgcgacctgctgtcctgccggggtggcgagtttttcctgcagtgtgattaataaattgcggacaggctgaatatgttccagatggagaaccggctcagtttttccgggaacgtggcggatgagcgtcggtacagaggtcatggggcggttacggttaggcagaatttcctgccccacaatggcgttgatggtggttgatttgcctgctttcatcgtgccgacaacagccagcaccatctccctgcgggcggttttgatttgttcgccctccagctcctcaattcttttcagtgctttctgtttatcaaaaagcagtctgttttcgttcttactgtcagataacacatctggctcctcaaccatttgccggagcagattaatgttcagttgcaaaagtcggtcggcttcatcacaaagcagggcgatgttcttttcgtgcattatttaaccttcctgagacgcattttcatgacaaccacggaggaggtcatttactacaaacgatcgtttataacgatcgatatgatagtaacgatcgatgtattctattaacttgggaagcacaacgcaaggggacaccccgggtatggctgcgtttgcatagtgttttcatggagttaaaaatctgtaacaacagcctggtacatcaccaccgggttcagaagaaaatccagttccataccgcgcgggcaacagagaccaccgtgtcacgaactgcgcgcagggccgtacggacaacagaggcaacacagacactctccgccgtgtcaaatatccggtccaccgcaccggtaaactgttcacgggtctgagtgcggacagactccgtgcgcagttcgtcctgcaggcgtgtcatcagagggatggcggcatgtccgggaagcgctgtcatgagtgcactgaccggggtgacctccccctgaaacagtgcattacagagtgaggatttaccggccccgcttttacccataatgccaggcacgggttcgtggctggtgagtttgcgcagatgttccaggatgtgacgggaaagtgagtaaggcagggaggagagcggtttttcaattgcctcaatggcatcagacggattcatacatgtattcccggtgaaaaaagacaaaaccccgcgcaccggaaaggtggcggggggattcacggagataatatctgcctgaaattatttggaatgcaggtatatgtggctgatttgtatcagctaatgagtacaggtctgaatctaatctgacagtccgctctgtgccaggagcggactgtccaacccatccctgaagagcctagattatgtatggtaattcagtcatcaaaataacgttggtcaccatcacaaaattcacatcctcggatatggctcagttcaggaacgctatcgctcaggtgaccgcaacaaccacatacatgaagctcggtgtaatagatgaaacactgagtgcaaagatagccgtctccaaatttacatacgctttcaggagtcatgcaattggtacatccagcaggaaatacggagagtagctgttcatccacactgtggaacaactcctcatccagcagtttatacctatccgaagtgtagtcgcagtgttcgcattcaaaatcactatctccctcaggtagcaattgaggtatttcgcagtctggacaaactagggtaatttgccttacagcactggtgcaaaccttacaccgcgtaacttcaagcttacggttttcattaccggtcgtttcagtccctgttaccgtcgcatgctgatggcactcattgcagttaccgatttgaatattcttttcagagagctgctcgagttcaggcttaacctgtttaaaccgcacctcggcataaaatttgtttcccctaatcagacgagtttcaccgaaagccagcttccaattatgtttgacaccgaagataactttccattcatcccttaataaccggttcagggcaaaccaggcgtcagcttgttctttgagtatttgacgttgttcagcctcggtgaaagtggggtggtagaaatgaactacgcggttgcggtgctttctgaccttatcaaaagcactgtccgtttctctgtctaggggtctttcaagtacgtccttaagcctttcacgggtttcttcgtaggtcaccgactgaaaatcaccggctaggtaagcctgcttttttattggctttttcgggctgcagaccaacgaccagtgttcgtgcgccagcggaactttcagtaaaatctcgaccgcagtccagaaactgacgacggagaacttcggcttcgaggcctccaactcttcacgggctttatccagaaaatccagaccattgttgatcagcgcctgcacatcctgactgagttcacggggggcgggagtatcgggtgcagtatcgtcaacatcgaacatcattatctcctttaatcagcttccaccacgcagttgctacagcgcgttagttgtatccagtgtaaactggacttggtagctggcagccacatcgagcgcaaaaaaccgtaaattaacttctgtagactcgtacttttcgtgacccatgcgtacccgcaggatcttcgggtgcacgtgaccataaagcaggtgcctaccaaagctgtggcgattcagatccctaaactgatggggtcccaaaaagtatgccatagcaagtgtaagtatccctaaaatctgcactattctctttttataaatcctctgacatgtgaattagattgccctaaagtgagcttccgcgcctcgctcataaggacaaccatactcaaatctcccacattgcaggagatttgagtatgaacacgtcaccgtggaacaaagaccgtatcataggccaaaaaagaccacttcagatatctcatatctggggtatccgaatccgacttgaactggaaggtaaaacacgcgatttagctctgttcaacatggccttggacagtaagcttcgaggctgtgatctagtcaaactcaaagtatctgatgttgcatatggtagctctgtttcaagcagagctacggttctacaacagaaaaccggcagccctgtccaatttgagataaccaaagggacaagagaagctgtttctgcattgataaagcttggcaatttacgcagtaaagactatttgttccgatctcgggtcggtactaaccaacacatatcaacccggcaatacaaccgaatttttcatgggtgggtagcaaaacttggtctcgaagattcgctttacagtacacattccttgagaagaacaaaaccttacctgatttacaagaaaactaagaatctcagggtgatccaacttctgttaggccataagaaactggaaagcacagtccgttatctgggcattgaagtcgatgatgcgttagagatctctgaatcgattgaagtctaaggttgccagggctgcaacagcagtcctgtgccagatgcggacgttgctctattcatgtaagattaatagaatgtctttcgataaatttttgacttaatcttaaataagaatgacttttttgcatgtcagcgttttactttgcattcagaaataaatagaattttgaaaaaataagagagaaatcatgatacactccaaaaaaattaaaaaacaaaaagagaggaactatgtcacatccccctaaaaaacttaaaaaatcattaattactgtttttttgagtggtattcttgctgttcttggatattttgttgcattgaacggagtgtttgatttatatcaacatatcgcagataattttttgcaaaaaaaagcagaggataatcttcatgtgatttacaccggagcgtcaataaagtacatcgagtcaatttttggccctcccgtgaaggaagaacattctgaggatgggagggttcatgagtatatttactctttcaaaaagttctatctgcaagtggtttatgataataataacacagtgatactctattccgtaaccagcaaggatgagaattttcatcctgaagtaccatatctgagaaaaacccttggacataagttcaaagattttggaagtgatattgattatttacagtcgagctattcttcgaagttctatcaatatgaagaagggcattatttaggaaatcctggcaactatagaaatttttaccttgcctataaccctgctggagttgattattttgagttagatccacttccagatctctctaatgacgacaaatcgcctccaaataaaaatgatcttgaaaaattcagaaataataatgctccaaatacatttggggttggcgatatccacggaggtcctgaggggcttgagttaagctttggacttgggattgattattacgatgcgagagatattccagataaagattagtgatcatgtatcataccatttttatatcgtttcaaattaggtagtcacaattagactagttaatctaaccagcactgaggtccgctcctcgctcagagcggacggccttcgtgaaagttagtcttgttgtggtggctctttccagcgccattgcaagacattctcatcgctgagaataaacagtcctgaccaaattgccgtccaaaactggatattcagacaccatgggcgtgtcataaaccagcgtaacggttttgcttcaaacagatgaataccttttcgcgatggtgaatataacggggggcgtcccactaacggcagacaaaagccccatttccaatattcagcaatacgccttcgggcacattcaattgcattacagttccagatgataccccaacgccgtttccatgtatcattgagacaccagttttgcattagcgaatatttgggcgaattgtcaatagatatactttcaccagtcattaattttatcgtgcaatattttaactggtactgttcaaccgtaaatgcgaatccatcatctagaataagtacatcaagtgtaggaatatttgaaagcgttaatattatcggtgagttatttacatcatgaatgcatagtgtttcttggtagcgtaagccactgccaatggcttcaaaaacaagttcaacttgttgcagtcgttcctctttgcttctgaaagcaatacgtgaacaacgaggttctttatctgtcaactgagcaaatcgtagactgtactccaaataattccctaaggaatgccagctcgcccctagcctgtgtctcactgcccagcgctcatgtgagagttgataagtttttatcagcattatctgggtaagagtagaccagcatttcttcactactgtaacaattgcaccaaaaggaacaggaagtgacattactaaacccctacaaatatcagataattaggttttatatcatttcagtcagtgtaatcaaatgataatcaggattggggctaatcttgaacgccactaaagatcggcaacaatggggatccaatgtttcgttagtgatttttcgcattagcagatacatgcttacttccgctcctcgctctcagcggaccttcagctcagtgatatcgtccgctctgtgccaaaggcggacgctcaagtagatactgtcctgacagtatgcggtaatcagagttgttatatattacttgcgtccaaaccagctttctgacaacccggccgctcctgctttcaacaacgcgccgccatacttttatgctgcaaagagcggagacagaaggttagcgtaatttgtaaataacttacattcacgtgtgatctggatcataattttgcctatgcaccgatcgtaatataaatatttacataacgatcagtgattcatgaaaactcaaataactttcgctgcgcttttgccagcattagcgtctttcataccgcttcatgctcatgcctcgtctacttctgaagatgaaatgattgtcacgggcaacaccgccgccgacaccaccgattctgccgccggtgccggtttcaaaacgaacgatatagatgtcggcccgctgggaacgaaatcctggatcgaaacaccatattccagcaccactgttactaaagagatgattgaaaatcagcaggcgcaaagcgtcagcgagatgctgaaatactctcccagtacgcaaatgcaggcgcgcggtggaatggatgtcgggcgtccgcaaagtcgggggangcnggnnnnnnngnngncnannnncnnnnngnnnggnnnnannnnnnttnnannancnnnnttncngnngnaannnntnnnnnnnnngnnnnnnntnannnnttnnncngnnnnnnnnnnngnccngnnnnnccnnnnnggnnnnttnnnttnnnngnnnnnnnnccnnncnnnnnnnnnnnnnnnnaannnnnnnnnggnnnnnnaannnnnnnnnnnnntnncnnnnnnnnnnnnnnnngnnnnnnnnttnnnnnaaannnannnnntnnnnnnnnnnnnnnnnnnnnnnnnnnnnnnnnggnnnnnnnnnnnnnnnnnnnnnnnnnnnnnnnnnnannnnnttnnnnnnnnnnnnnnnnnnnnnnnnnnnnnnnnnnnnnnnnnnnnnnnnnnnnnnnncnnnnnnnnnnnnnnnnnnnnnnnnnnnnnnnnnnnntnnnnnnnnngnnnnnnnnnnnnnnnnnnnnnnnnnnnnanncnnnnnnnnaaaannnnnnnnnnnnnnnnnnnngnnnnnnnnnnnnnnnnnnnnnnnnnnnnnnnnnnnnnnnnnnnnnnnnnnnnnnnnnnnnnnnnnnnnnnnnnnnnnnnngnnnnnnnnnnnnnnnnnnnnnnnnnnnnnnnnnnnnnnnnnnaannnnnnnnnnnnnnngnnnnnnnnnnnnnnnnnnnnnnnnnnnnnnnnnnnnnnnnnnnntnnnnnnnnnnnnnnnnnnnnnnnnnnnnnnnnnnnnnnnnnnnnnnnnnnnnnnnnnnnnnnnnnnnnnnnnnnnnnnnnnnnnnnnnnnnnnnnnnnntnnnnnnnnnnnnnnnnnnnnnnnnnnnnnnnnnnnngnnnnnnnnannnnnnnnnnnnnnnnnnnnnnnnnnnnnnnnnnnnnnnnnnnannnnnnnnnnnnnnnnnnnnnnnnnnnnnnnnnnnnnnnnnnnnnnnnnnnnnnnnnnnnnnnnnnnnnnnnnnnnnnnnnnnnnnnnnnnnnnnnnnnnnnnnnnnnnnnnnnnnnnnnnnnnnnnnnnnaannnnnnnnnnnnnnnnnnnnnnnnnnnnnnnnnnnnnnnnnannnnnnnnnnnnnnnnnnnnnnnnnnnnnnnnnnnnnnnnncnnnnnnnnnnnnnnnnnnnnnnnnnnnnnnnnnnnnnnnnnnnnnnnnnnnnnnnnnnnnnnnnnnnnnnnnnnnaaannnnnnnnnnnnnnnnnnnnnnnnnnnnnnnnnnnnnnnnnnnnnnnngnnnnnannnnnnnnnnnnnnnnnnnnnnnnnnnnnnnnnnnnnnnnnnnnnnnnnnnnnnnnnnnnnnnnnnnnnnnnnnnnnnnnnnnnnnnnnnnnnnnnnnnnnnnnnnnnnnnnnnnnnnnnnnnnnnnnnnnnnnnnnnnnnnnnnnnnggnnnnnnnnnnnnnnnnnnnnnnnnnnnnnnnnnnnnnnnnnnnnnnnnnnnnnnnnnnnnnnnnnnnnnnnnnnnnnnnnnnnnnnnnnnnnnnnnnnnnnnnnnnnnnnnnnnnnnnnnnnnnnnnnnnnnnnnnnnnnnnnnnnnnnnnnnnnnnnnnnnnnnnnnnnnnnnnnnnnnnnnnnnnnnnnnnnnnnnnnnnnnnnnnnnnnnnnnnnnnnnnnnnnnnnnnnnnnnnnnnnnnnnnnnnnnnnnnnnnnnnnnnnnnnnnnnnnnnnnnnnnnnnnnnnnnnnnnnnnnnnnnnnnnnnnnnnnnnnnnnnnnnnnnnnnnnnnnnnnnnnnnnnnnnnnnnnnnnnnnnnnnnnnnnnnnnnnnnnnnnnnnnnnnnnnnnnnnnnnnnnnnnnnnnnnnnnnnnnnnnnnnnnnnnnnnnnnnnnnnnnnnnnnnnnnnnnnnnnnnnnnnnnnnnnnnnnnnnnnnnnnnnnnnnnnnnnnnaannnnnnnnnnnnnnnnnnnnnnnnnnnnnnnnnnnnnnnnnnnnnnnnnnnnnnnnnnnnnnnnnnnnnnnnnnnnnnnnnnnnnnnnnnnnnnnnnnnnnnnnnnnnnnnnnnnnnnnnnnnnnnnnnnnnnnnnnnnnnnnnnnnnnnnnnnnnnnnnnnnnnnnnnnnnnnnnnnnnnnnnnnnnnnnnnnnnnnnnnnnnnnnnnnnnnnnnnnnnnnnntnnnnnnnnnnnnnnnnnnnnnnnnnnnnnnnnnnnnnnnnnnnnnnnnnnnnnnnnnnnnnnnnnnnnnnnnnnnnnnnnnnnnnnnnnnnnnnnnnnnnnnnnnnnnnnnnnnnnnnnnnnnnnnnnnnnnnnnnnnnnnnnnnnnnnnnnnnnnnnnnnnnnnnnnnnnnnnnnnnnnnnnnnnnnnnnnnnnnnnnnnnnnnnnnnnnnnnnnnnnnnnnnnnnnnnnnnnnnnnnnnnnnnnnnnnnnnnnnnnnnnnnnnnnnnnnnnnnnnnnnnnnnnnnnnnnnnnnnnnnnnnnnnnnnnnnnnnnnnnnnnnnnnnnnnnnnnnnnnnnnnnnnnnnnnnnnnnnnnnnnnnnnnnnnnnnnnnnnnnnnnnnnnnnnnnnnnnnnnnnnnnnnnnnnnnnnnnnnnnnnnnnnnnnnnnnnnnnnnnnnnnnnnnnnnnnnnnnnnnnnnnnnnnnnnnnnnnnnnnnnnnnnnnnnnnnnnnnnnnnnnnnnnnnnnnnnnnnnnnnnnnnnnnnnnnnnnnnnnnnnnnnnnnnnnnnnnnnnnnnnnnnnnnnnnnnnnnnnnnnnnnnnnnnnnnnnnnnnnnnnnnnnnnnnnnnnnnnnnnnnnnnnnnnnnnnnnnnnnnnnnnnnnnnnnnnnnnnnnnnnnnnnnnnnnnnnnnnnnnnnnnnnnnnnnnnnnnnnnnnnnnnnnnnnnnnnnnnnnnnnnnnnnnnnnnnnnnnnnnnnnnnnnnnnnnnnnnnnnnnnnnnnnnnnnnnnnnnnnnnnnnnnnnnnnnnnnnnnnnnnnnnnnnnnnnnnnnnnnnnnnnnnnnnnnnnnnnnnnnnnnnnnnnnnnnnnnnnnnnnnnnnnnnnnnnnnnnnnnnnnnnnnnnnnnnnnnnnnnnnnnnnnnnnnnnnnnnnnnnnnnnnnnnnnnnnnnnnnnnnnnnnnnnnnnnnnnnnnnnnnnnnnnnnnnnnnnnnnnnnnnnnnnnnnnnnnnnnnnnnnnnnnnnnnnnnnnnnnnnnnnnnnnnnnnnnnnnnnnnnnnnnnnnnnnnnnnnnnnnnnnnnnnnnnnnnnnnnnnnnnnnnnnnnnnnnnnnnnnnnnnnnnnnnnnnnnnnnnnnnnnnnnnnnnnnnnnnnnnnnnnnnnnnnnnnnnnnnnnnnnnnnnnnnnnnnnnnnnnnnnnnnnnnnnnnnnnnnnnnnnnnnnnnnnnnnnnnnnnnnnnnnnnnnnnnnnnnnnnnnnnnnnnnnnnnnnnnnnnnnnnnnnnnnnnnnnnnnnnnnnnnnnnnnnnnnnnnnnnnnnnnnnnnnnnnnnnnnnnnnnnnnnnnnnnnnnnnnnnnnnnnnnnnnnnnnnnnnnnnnnnnnnnnnnnnnnnnnnnnnnnnnnnnnnnnnnnnnnnnnnnnnnnnnnnnnnnnnnnnnnnnnnnnnnnnnnnnnnnnnnnnnnnnnnnnnnnnnnnnnnnnnnnnnnnnnnnnnnnnnnnnnnnnnnnnnnnnnnnnnnnnnnnnnnnnnnnnnnnnnnnnnnnnnnnnnnnnnnnnnnnnnnnnnnnnnnnnnnnnnnnnnnnnnnnnnnnnnnnnnnnnnnnnnnnnnnnnnnnnnnnnnnnnnnnnnnnnnnnnnnnnnnnnnnnnnnnnnnnnnnnnnnnnnnnnnnnnnnnnnnnnnnnnnnnnnnnnnnnnnnnnnnnnnnnnnnnnnnnnnnnnnnnnnnnnnnnnnnnnnnnnnnnnnnnnnnnnnnnnnnnnnnnnnnnnnnnnnnnnnnnnnnnnnnnnnnnnnnnnnnnnnnnnnnnnnnnnnnnnnnnnnnnnnnnnnnnnnnnnnnnnnnnnnnnnnnnnnnnnnnnnnnnnnnnnnnnnnnnnnnnnnnnnnnnnnnnnnnnnnnnnnnnnnnnnnnnnnnnnnnnnnnnnnnnnnnnnnnnnnnnnnnnnnnnnnnnnnnnnnnnnnnnnnnnnnnnnnnnnnnnnnnnnnnnnnnnnnnnnnnnnnnnnnnnnnnnnnnnnnnnnnnnnnnnnnnnnnnnnnnnnnnnnnnnnnnnnnnnnnnnnnnnnnnnnnnnnnnnnnnnnnnnnnnnnnnnnnnnnnnnnnnnnnnnnnnnnnnnnnnnnnnnnnnnnnnnnnnnnnnnnnnnnnnnnnnnnnnnnnnnnnnnnnnnnnnnnnnnnnnnnnnnnnnnnnnnnnnnnnnnnnnnnnnnnnnnnnnnnnnnnnnnnnnnnnnnnnnnnnnnnnnnnnnnnnnnnnnnnnnnnnnnnnnnnnnnnnnnnnnnnnnnnnnnnnnnnnnnnnnnnnnnnnnnnnnnnnnnnnnnnnnnnnnnnnnnnnnnnnnnnnnnnnnnnnnnnnnnnnnnnnnnnnnnnnnnnnnnnnnnnnnnnnnnnnnnnnnnnnnnnnnnnnnnnnnnnnnnnnnnnnnnnnnnnnnnnnnnnnnnnnnnnnnnnnnnnnnnnnnnnnnnnnnnnnnnnnnnnnnnnnnnnnnnnnnnnnnnnnnnnnnnnnnnnnnnnnnnnnnnnnnnnnnnnnnnnnnnnnnnnnnnnnnnnnnnnnnnnnnnnnnnnnnnnnnnnnnnnnnnnnnnnnnnnnnnnnnnnnnnnnnnnnnnnnnnnnnnnnnnnnnnnnnnnnnnnnnnnnnnnnnnnnnnnnnnnnnnnnnnnnnnnnnnnnnnnnnnnnnnnnnnnnnnnnnnnnnnnnnnnnnnnnnnnnnnnnnnnnnnnnnnnnnnnnnnnnnnnnnnnnnnnnnnnnnnnnnnnnnnnnnnnnnnnnnnnnnnnnnnnnnnnnnnnnnnnnnnnnnnnnnnnnnnnnnnnnnnnnnnnnnnnnnnnnnnnnnnnnnnnnnnnnnnnnnnnnnnnnnnnnnnnnnnnnnnnnnnnnnnnnnnnnnnnnnnnnnnnnnnnnnnnnnnnnnnnnnnnnnnnnnnnnnnnnnnnnnnnnnnnnnnnnnnnnnnnnnnnnnnnnnnnnnnnnnnnnnnnnnnnnnnnnnnnnnnnnnnnnnnnnnnnnnnnnnnnnnnnnnnnnnnnnnnnnnnnnnnnnnnnnnnnnnnnnnnnnnnnnnnnnnnnnnnnnnnnnnnnnnnnnnnnnnnnnnnnnnnnnnnnnnnnnnnnnnnnnnnnnnnnnnnnnnnnnnnnnnnnnnnnnnnnnnnnnnnnnnnnnnnnnnnnnnnnnnnnnnnnnnnnnnnnnnnnnnnnnnnnnnnnnnnnnnnnnnnnnnnnnnnnnnnnnnnnnnnnnnnnnnnnnnnnnnnnnnnnnnnnnnnnnnnnnnnnnnnnnnnnnnnnnnnnnnnnnnnnnnnnnnnnnnnnnnnnnnnnnnnnnnnnnnnnnnnnnnnnnnnnnnnnnnnnnnnnnnnnnnnnnnnnnnnnnnnnnnnnnnnnnnnnnnnnnnnnnnnnnnnnnnnnnnnnnnnnnnnnnnnnnnnnnnnnnnnnnnnnnnnnnnnnnnnnnnnnnnnnnnnnnnnnnnnnnnnnnnnnnnnnnnnnnnnnnnnnnnnnnnnnnnnnnnnnnnnnnnnnnnnnnnnnnnnnnnnnnnnnnnnnnnnnnnnnnnnnnnnnnnnnnnnnnnnnnnnnnnnnnnnnnnnnnnnnnnnnnnnnnnnnnnnnnnnnnnnnnnnnnnnnnnnnnnnnnnnnnnnnnnnnnnnnnnnnnnnnnnnnnnnnnnnnnnnnnnnnnnnnnnnnnnnnnnnnnnnnnnnnnnnnnnnnnnnnnnnnnnnnnnnnnnnnnnnnnnnnnnnnnnnnnnnnnnnnnnnnnnnnnnnnnnnnnnnnnnnnnnnnnnnnnnnnnnnnnnnnnnnnnnnnnnnnnnnnnnnnnnnnnnnnnnnnnnnnnnnnnnnnnnnnnnnnnnnnnnnnnnnnnnnnnnnnnnnnnnnnnnnnnnnnnnnnnnnnnnnnnnnnnnnnnnnnnnnnnnnnnnnnnnnnnnnnnnnnnnnnnnnnnnnnnnnnnnnnnnnnnnnnnnnnnnnnnnnnnnnnnnnnnnnnnnnnnnnnnnnnnnnnnnnnnnnnnnnnnnnnnnnnnnnnnnnnnnnnnnnnnnnnnnnnnnnnnnnnnnnnnnnnnnnnnnnnnnnnnnnnnnnnnnnnnnnnnnnnnnnnnnnnnnnnnnnnnnnnnnnnnnnnnnnnnnnnnnnnnnnnnnnnnnnnnnnnnnnnnnnnnnnnnnnnnnnnnnnnnnnnnnnnnnnnnnnnnnnnnnnnnnnnnnnnnnnnnnnnnnnnnnnnnnnnnnnnnnnnnnnnnnnnnnnnnnnnnnnnnnnnnnnnnnnnnnnnnnnnnnnnnnnnnnnnnnnnnnnnnnnnnnnnnnnnnnnnnnnnnnnnnnnnnnnnnnnnnnnnnnnnnnnnnnnnnnnnnnnnnnnnnnnnnnnnnnnnnnnnnnnnnnnnnnnnnnnnnnnnnnnnnnnnnnnnnnnnnnnnnnnnnnnnnnnnnnnnnnnnnnnnnnnnnnnnnnnnnnnnnnnnnnnnnnnnnnnnnnnnnnnnnnnnnnnnnnnnnnnnnnnnnnnnnnnnnnnnnnnnnnnnnnnnnnnnnnnnnnnnnnnnnnnnnnnnnnnnnnnnnnnnnnnnnnnnnnnnnnnnnnnnnnnnnnnnnnnnnnnnnnnnnnnnnnnnnnnnnnnnnnnnnnnnnnnnnnnnnnnnnnnnnnnnnnnnnnnnnnnnnnnnnnnnnnnnnnnnnnnnnnnnnnnnnnnnnnnnnnnnnnnnnnnnnnnnnnnnnnnnnnnnnnnnnnnnnnnnnnnnnnnnnnnnnnnnnnnnnnnnnnnnnnnnnnnnnnnnnnnnnnnnnnnnnnnnnnnnnnnnnnnnnnnnnnnnnnnnnnnnnnnnnnnnnnnnnnnnnnnnnnnnnnnnnnnnnnnnnnnnnnnnnnnnnnnnnnnnnnnnnnnnnnnnnnnnnnnnnnnnnnnnnnnnnnnnnnnnnnnnnnnnnnnnnnnnnnnnnnnnnnnnnnnnnnnnnnnnnnnnnnnnnnnnnnnnnnnnnnnnnnnnnnnnnnnnnnnnnnnnnnnnnnnnnnnnnnnnnnnnnnnnnnnnnnnnnnnnnnnnnnnnnnnnnnnnnnnnnnnnnnnnnnnnnnnnnnnnnnnnnnnnnnnnnnnnnnnnnnnnnnnnnnnnnnnnnnnnnnnnnnnnnnnnnnnnnnnnnnnnnnnnnnnnnnnnnnnnnnnnnnnnnnnnnnnnnnnnnnnnnnnnnnnnnnnnnnnnnnnnnnnnnnnnnnnnnnnnnnnnnnnnnnnnnnnnnnnnnnnnnnnnnnnnnnnnnnnnnnnnnnnnnnnnnnnnnnnnnnnnnnnnnnnnnnnnnnnnnnnnnnnnnnnnnnnnnnnnnnnnnnnnnnnnnnnnnnnnnnnnnnnnnnnnnnnnnnnnnnnnnnnnnnnnnnnnnnnnnnnnnnnnnnnnnnnnnnnnnnnnnnnnnnnnnnnnnnnnnnnnnnnnnnnnnnnnnnnnnnnnnnnnnnnnnnnnnnnnnnnnnnnnnnnnnnnnnnnnnnnnnnnnnnnnnnnnnnnnnnnnnnnnnnnnnnnnnnnnnnnnnnnnnnnnnnnnnnnnnnnnnnnnnnnnnnnnnnnnnnnnnnnnnnnnnnnnnnnnnnnnnnnnnnnnnnnnnnnnnnnnnnnnnnnnnnnnnnnnnnnnnnnnnnnnnnnnnnnnnnnnnnnnnnnnnnnnnnnnnnnnnnnnnnnnnnnnnnnnnnnnnnnnnnnnnnnnnnnnnnnnnnnnnnnnnnnnnnnnnnnnnnnnnnnnnnnnnnnnnnnnnnnnnnnnnnnnnnnnnnnnnnnnnnnnnnnnnnnnnnnnnnnnnnnnnnnnnnnnnnnnnnnnnnnnnnnnnnnnnnnnnnnnnnnnnnnnnnnnnnnnnnnnnnnnnnnnnnnnnnnnnnnnnnnnnnnnnnnnnnnnnnnnnnnnnnnnnnnnnnnnnnnnnnnnnnnnnnnnnnnnnnnnnnnnnnnnnnnnnnnnnnnnnnnnnnnnnnnnnnnnnnnnnnnnnnnnnnnnnnnnnnnnnnnnnnnnnnnnnnnnnnnnnnnnnnnnnnnnnnnnnnnnnnnnnnnnnnnnnnnnnnnnnnnnnnnnnnnnnnnnnnnnnnnnnnnnnnnnnnnnnnnnnnnnnnnnnnnnnnnnnnnnnnnnnnnnnnnnnnnnnnnnnnnnnnnnnnnnnnnnnnnnnnnnnnnnnnnnnnnnnnnnnnnnnnnnnnnnnnnnnnnnnnnnnnnnnnnnnnnnnnnnnnnnnnnnnnnnnnnnnnnnnnnnnnnnnnnnnnnnnnnnnnnnnnnnnnnnnnnnnnnnnnnnnnnnnnnnnnnnnnnnnnnnnnnnnnnnnnnnnnnnnnnnnnnnnnnnnnnnnnnnnnnnnnnnnnnnnnnnnnnnnnnnnnnnnnnnnnnnnnnnnnnnnnnnnnnnnnnnccccggcataacaaccggggagaaacgtaaaaaatcagtaggggaatattcctgccaggagagaaactgttgtgtacaggcaatacaggttgtctgttttgtcagtgaagccggtataaacggaagatgattttgtgttgccggaatatgggatggcgttttgccgtgacgggatcagtattttcagtgatgattattactgtgcaggggagtaccggagataaaccacgccctgtacctgccagagcggaggtttgtatttactgaacggaagataaagcgaggtaaacactgttgcggtgagcggagaagactgagattattctctgtaattacaaacaacagtgatctgatccggtttttttaccgttacgggtttccggggatcaattttatagaccggggtaatgaccacgccggaatttatggagaaaagcgggatccagcaataaacgtccggatatttctgtgtctccggaataccttttgcgccagaggccatcagatctttaacgctcacgaaaaatgactgccgcagatcaaaaaagtactcgtcatatatcacgtcttttgccagcaggatgactgcattaccaacagccgcttttacaggtgtcccaccggatggattatcgtgattgtatattgttctttcaatataaataaaacaggcatattttgccttctccccggacagttgcatctggtattcgcaaatgtctttgatacgccggctttcaacccgtccaatcatcttatcccggcgatagtgtcttttatgtttcagcgcgtacagaacaccatttgaactgtcaaactccaggattcttttggtgaaaagtttgttttcccagatctccagacaatacttctctgcactgacgacattgcgtttgtgaggaagatcccgttgatacactccatttaataagcgtgactgcagtttgcctgcaagttgataataacagttaatatcgttaaggacaggtgctgtggcgctgagtaatgcgtcgattaccttagagcgcgaaagtttgtgggtatgacagtactcatccacaattcgcagcgtctcatcactggtcatattgaaagttatacgtgttgtcatgatgaaattttctgttaatcatactggttgatatgcataacatttcataaaaaatacttttaattcatataattgattttttgactggttttatcctcgtgtggtggaaagtagtgttactgccactgtagtcagcataactctatcacacagaaccaccgaaaatgaagcattgctcaggggggaagctgccactcgtacgagttttctgagcaatgataaccagtatttttcgttttgggcgatttgtttatcgttacagctaaaaacagttcatgtaccattaaaaaataataaaggttaattagtattatttatagaagtatgtttatgtaattctaccgtgtaaatgaactctgtcattgtaccttgtaattctatcctgtaattctacctcgtaaatacaccttgtaaccaagtcctgcagaagtctgtctcatcgaacaatattcctgtgcagcgatattctctgtagtagtacttgtaactctgcccttaactctctcttcagtaatgtagtcccgccacacctgaatataaatctgtaatgttcacacactgactgtaacgtgctttgttaagtaatgtctgctatttttttctgttatttttcctgttgttttctgtattttgttgtatggtgtaataactattctgaacccgtcatcacctttatagctaagagtatgacttcgccagtgttgatactgtggataacggtgattaaggaattactgttaatgatctgttcctgcagctcacctgatgagttttggtagtaatacgtaaaagagtatgcctcatgtcattaaaaagtcttccggagtgttgtttaaccctgtacctctattactcatgtagtacgttgcggaaagctacgttaattgtaatatctggttatggcgttatgccttcagtattaaaaacatcttttaccggagaaacagggaagtggaaaggctttcgggataacgtcaggccattatgacgatattacgttaatcacagtacaagataacgagagggtaatggaattttaaaccagagtagttccactgttgttcactggaaaaagtgatttcccacgcgcgttataagcttactccagaggagatggaagccttcaactctgcggtcgatcaccggctggcagaactgaccatgaacaaactttacgatcgtgttcccgcttcagtctggaaatatgttacctgataaatgtttctgatgaagtacagtcgtcacaatgacatcacttcagatattatctgcgctgtgattgactgtcacgtatgccgttctctgtatggttctgatacccgggtgtggtcccactttctctgtggcgcccggggagttgtgaacctgcacgtcttcgtgtgataacgttttcttcaaaaattacgccagcgcttcttcctgtgttacagaacacgaggaagaaacatgaagacttacaacaccaatcccggttacgaaatggatccccagctcctgacacactttaaccagcatctggattcattattcggggtatattcgaaactgttaccgttcagaatggattttgcttaccgaaaaaacaccctcagctacaggtgtgcctgcaggtacgccatgtgtgcggagatactgcgactgattaacgaagtgggagagaaactggtcgggtatgcctgggtaatggaatatacggaacgtaaagggcttcacattcattttgtgggctatctgaacggtcagagccacaggagttcgtatctggtatccagattgatgggagatatctggaggcgggttaccgggggggatggttactaccactggtgccggtttaataaaaattatccggtaaacattaaccacgtcattcactattcagatcacaaagcggtgaatgccttacgctatgccctcagctacctggccaaacgagaacagaaagaatgtggcatcatcctgaaatgcagcgggcttcctgaaaaaagtaaccggggtcgaccgcgactgggcagcaccctgccggagacttattctctggtgtaagaccctgaacgacaactacgggctggcgctaattgttacggtcggttccggaggccacttcagggactctgcgcattttttacgacatggctattccgtatgaaccatacggagatttaaccatggcacattctttaccattccttccggcaaccgatacagcgcatcccccgatgtccatccctgcctactgacagttttttacgccggtgggccattgtgtgacaaccacagtgctgtaacagcaaccagcctgctttacccaaactccagtccagattttaactgaaccgccattcaccccctgaccacactgcccgtaccgggacagctgttgcctgcgtgtcgtctggcggctgaggaatatgacgatgtacgcaaaatcctttattgcatttgatggcaatgggcgtctgacgggtgcccgtaccgcacagactgcaccttacgatcgctacacttgccacctttgcggcagtgcgctcagataccacccgcaatacgacactgagcgtccctggtttgaacacactgacgacgggctgacggagcacggtcagcagtgcccttatgtcagaccggaacgcagggagatacaactgattaagcgtctgcagcaattcgtaccggatgccttacccgtggtgcgtaaagccagccggcactgcagacaatgtcatcacgattattatggggagcggtactgcacgcactgccataccgggcacttcagtgaggagggggtggcagaatgaacggtataaaaacggggctggggatcacgccgggtgaacacataatcagtgctgattctgcactcagcagaaatatccggcagtgtttctgcctttcctgtcatggccggttgattttgcagacagatgctcagggggcatggtttgagcatgatttatatgccctgagcgagcaacagaaggcagcctgcgtggtgctgaatccggaaaagtcccacccttacattgaggatatggagatgtttttatcgccattaccggtcgtgctggagtggcattgtatgatgtgtgagcagttttttcatgggaagaaattctgtgaggcctgtggtacggggatttattgcagagcggtatgtacgaagtctgtttacagctaccagccagacttgtttcaggactgcggaggtgcgagtacttaatccgaaatgcccgacctgctcagggcgttcagaggtatcggaacctgcattttatctggtgtttcgcacccaccccgttcgtgacacaaaggcgcgacaccggatatccgcagtcctgcttacctgaataaaacccggggtattgattgtgtactgtggtgcgaaatcgcaccgtgatcgcggattcgccgaatccgcactgtggtgtcaaccaaccatacgcgagagtcctctccgtatttatcagtgcctcaggacgatttctgcatagttaatccagggggctgcattgtttatttccctgctaatggacgtgacatccaggatattcatgatcctgatttccctgagcagtatcagcgcttattggagcgtctggattatcagacgatgcccggtactaaagcatcaggccagcgtaactctggctacagcggtttttgacctgttgtaactgtaaggtgatttattatgtatacagaatcaaatgttaagctttcctgtaacgccctctggcaaaagtgtgtccttgcaactctgtatcgggctgcagccacacatcctgaaattaaattattacaatttaaattaataccagggcagggtattaataaggccattccctctctgatggctgattttactggtgaactgcatagactcatttctgaatatttgcagtgtaagcgacgtaaagatcaatctgttgagcccacccctttatattatctctggagtagggaagctgtggctaacgataccactccttatcttatggtgctgctacttaataacgatgtctggtgtaagagtcgtgaggtggtggttctcagaaatctgattgagcaggcgtggggaaaagtattgggtgaagataactccattacacatctggttgtgtatcctgaagtgctgtcgttggtatttgatgcagctaacacatacaacgctgagcctggtgtactggaacagacggcccgggcttacattgaatcacatggtaccattgaacgtcatcttgggtgtagtgacttttaacgtcaggtgacgcattgtcacttctgacctgctacctgtacgccggaatataatggtcagagaggcatatttcgacgcccctaatctggggcgtttgattcaggatgtctggaataatccgggctttgtgtcaccgggcgcatcaaagcagtaccacccgggatgtggcgctggatcgtcatttaccggactgcgaagacatacttaaagaggtgatatgggcgttcagtgattttgtccgcgatcatcgaggtgtgtatgatccggaagcccgttacctcgccggtaatccctggtatcccgtaacaggccagttctgaaagcacagctcagcagattccccgcattcgcacaatcttcataaatctcacaggggacattctgaccgtgttgactacaacaagccacgacagcgtatttctgcgtgccgataattccctgatcgacatgaactatatcaccagtttcaccggtatgactgacaaatggttttacaagttgatcagtgaaggccatttccctaaacccatcaaactggggcgcagcagccgctggtacaaaagagaagtggagcagtggaagtgaagtagagcagtggatgtagcaacgaatcgagtgatcaagggggggggctgcagtattgttcaggattagtattatcagttgacgctatagaaataatagaaaaataaaataacttgagtgaatttaatgaagtcgtagaggttctaattagtatacctctggtaaaactatattgtttggtaaaagaaaggtctgctgaaacgtttaatttccattacaacagtaaacttatactcagattatgtaatatcgacatttgagataaattgtgaagataaaagagaagccatatttattatatatggcttctcataataactcatctatctaataaatttttaacgtaattaaccaattctttatctttactattattaaagaagcatttctggaatttttcgccaccaagagcttgtttaagtaactccggatcgatggcctggagagcatccatgagtggcttactaactgcttctttcatattactcagtataatggcattcgcattttgtgattcacgacgttctgccggatagcctaatcccttttcgccatcaaatgctttttcaaaaatatagcgcatgtttaattctgccccccagccaaaaccctttgcaaatggcaaggacagtgcattcccattatttacctgtgcaaacaggtaggcatctgttggttcgatgcaataaccacaagtaactcccgggaatgtgttcagtgccatcaatgccccctgtcctgtaccacagccagtaataacgaaatcaacagatctgctgtttaacaagatagccgaaataatgccgagatgaacgtaagtcagacgatgatcattgtcatcacacattcctacattgaaaatagtatggccttgatgtgcgcttgctgcaactaactcattaaaaattattgcgtttttagatgcctggctaaattcattcatcaatgcgattttcatacgaattcctcatttaaaatcatactgttaaacttcatagcataacaacatgaacgatatgataatacattacaaacattacttgcaacattgtatttgaaaattcaaaacatcatttcatttttattgttgtgtgctctcgatcacggtttgctgcacttttgaacgctatattggatgctaacgaaacgatagaaacgatatgatgaagtattgtcattcttataaaggataagattatatggctaagggtgatattaaaaagttgaagtttgaatctttctacgatagtgaatcgaataacgaagttattcgattaacgccaacagatattctttgccatcgcaattatttttatcaaaaatgttttacaaatgatggtaaaaaattgattttcgctgctgagtttgattgtaaccggaattattatcttatggatttggtaactcagacagcgaaacaactcactgaaggagctggagataacacctttggtggcttcctgtcccctgatgataattatcttttttatgtgaagaatgaaaaacatttgcagcgtgttgatttgaccacattagaagaagttaccatatacacagtaccggataattgggtggggtacggaacatgggttgctaatactgattgtacggaaatcgtcggaatcgaaatcagtaaaactgactggaccccgcttagcgactggaaaatatttctggaattttatcataagaatccacgatgccgtttaattacgattgatctggaaaccggaaacgctgaagtgatattggatcgtaatacttggttagggcatccaatttttcgtccgaataataacgatactatcgccttttgccacgaagggccccatgacctggtggatgcaagaatgtggatgattaaccgtgatgggacaaatgagcgtaaagtgcatgagcaccaacttggtgaaagttgtacacacgagttctggatccctgatggatctgcactggcttatgtttcctatatgaaaggacagcaacagcgttatattcgcaaatataatcctgatactgatgaagattcattagtgatggaaatgccggcatgttcccatttaatgagtaaccataatggtattctctatgttggtgatggttcaggtagtccggttgatgttaaagatacctgcagttataaaattgaaaatgatccctggatttacattcttagcagtaaaaataaaaaaatacataaattggtgaaacataatagttcctggagggtacagaaaggagaccggcaggtaacgcacccgcatccatcattttctccagataataagtacgttttatattcttgcgatgccgaaggtgaaccagcactatatatggctaaaattcctgaggaaatcttaacccagcaataactgacaaatttttcactattggagtttttatggatttcatcaatatgttctctcttaaaggtaaaaatgctttagtcactggagcatcatatggtattggttttgagatcgctaaagcactaagtaacgctggtgcaacgatcatttttaatgatgtaatagaagaaaacattaaaaaaggcctggcagcatataaagagaacaacatcaacgcacatggttatttatttgatattacagatgaacagtctgtgaaggaaaatatcaaaaaaatagagagtgacgtaggcattattgatattctggtaaataatgcagggattattcagcgtaaacctatgctagaaactacagcagctgattatcgcaaaataatagatattgatctgacaggtcagtttattatggctaaggcggtattgccttcaatgattaaaaaaggacatggcaagatcattaatatctgttccatgatgagcgaattgggtcgcgaaaccgttgtaggctacgcttcggcaaaaggcggcttaaaaatgctgactaaaaatatctgttctgagtttggtgaaaaaaatattcagtgtaatggtattggtccaggctacattgctacacctcaaacagcaccgttacgtgaaattcaaccagatggcagccgccatccatttgatcagtttattatatcaaaaacgccagctggacgctggggtaaaccagatgatcttgctggtgcagctatatttttagcatcggatgcttcaaactttatcaatggtcatattttatatgtcgatggtggcattctggcctacattggcaaacagccttagttatattcagtcataactgtatgtactactttaaatattttcagagaggtggtgatgtttgtatttaatgaagatacagcaatagaagatttaggcaacggggtcaaaagaaaagttttggctcatggtggcaatatgatggcagtagaggtccatttctctaagggggctatcggctctttacatcaccaccaacatgaacagttgacgtatgtcttatcaggtatttttgaatttaccatcggcgatgaagtgcgtacagtaaaaactggtgatactttatataagcagcccaacattgtgcacgggtgcaaatgtctagaaaaaggagttttgcttgatatatttacacctcaacgtcaggattttttaaagtaaatacccagtattaatatgaactaaaatggtagcgcataaaatgcgctacatattgatatagttaactaattatctattgtttttctttctgccatagacagctttaatctgaaaaatattatcttttaaatggaaattttagaaataatagaatctgattatccggatatttagttgaattctataaagtcgagtgaacatattgttgtatcaatatagttaatttaaataattcaggaaaaacacatatacagtgagactctataaatttactttataaataacagtgtaatgttacttcaataatatactccatcttttccaggagatggaaatggacttttgttgtggaagaggtatcataaatgactgaagaaaacagaagaataaaagccataactcgtttttcatatggtagtggaaatcttatcggcagtggagctctggctattagtggagcatggttactttatttctacactacattttgtggattgacagtttttcaggccactgtaatattttccattgctacttatctggatgtcatcctgaatccactaatggggtttattacggataatttttatcagacaaaactcggtcgtcgctttggtcgtcgtcgcttcttcatattaattgccattccatgtatgattatctatccattgctttgggtaaatggtatgagtttttggtattatctttctacttatatcatttttgaagtggtatatactatgattatgataccgtataataccttacctgttgaaatgacaaaggatttcaatcaaaggacctatttgacaggttctaaagctatgtttggtaaagtagctaatttcttagcagccgctattcctggtatctatttttacttcttcaataaagattcagccaccccatttttcctgaccggtttaacttatgctattattatgatcacttcattaataatgctctatttcaacagttgggaacgtccaactgatgatgtagttgatgaatcaacgcatggttttatggagggctttaataaactttttaccgatcttttctcaacctttaagctaaaaaccttcagaacccatcttggtatgtatctatttggtttcggcgctgaatggctatttacagcgacatttacctatttcattgttttcaaccttgaacaaccgagaacatttgtttctgagatgaactcattaagcagtatttgtcagttcttctctacagcattctttatgatgtggtgtgccaaacgaggatttaaacgcccatttatcattgctatcttaattgttgtatcttcagtgattggttatgttggtgtgtactatcttaatattccccatctgacctggctcattattggcatcactatctggtttggtctggggacgggggggggtatattacattccgtggagtgtatatgtattccttgccgatgttgatgaggtcttaactggtcgtcgtcgtgaaggtctttatgctggtgcaatggttatggccggtaagttaatgagagccactgtagtattttgtctgggggttgtcctcagtctgtttggttttgagtcaggcattcatcatcaatcagccagtgcagtaaatgcaattaatggcgtcatgatatttggtgtggctggtatggcgttaataggtatctatttctctgtaaaaatgaaattagataaagcatctcacgccgaaataactaaagaattagagcgtctgaaaaaaggtggcagaaaagaagatgctacaccggaaattcgtaagcttgttaagcaactgactggttatgaatatgaccagtgcttcggtaataacaatgttggctttaaatttgaaaacaaagcaggggcattctagaatgaataagcacacactattactgactgttctttttctgaatttgatttgtactcccgtttttgctcaaaactggcaggtggcgacgtttggtcagtctacggatctcaacttttcatcgctgatagattcggccaagatcggacggaataatgcctggcttgcaggaaacaataattttcttgaagctggaaaattttacactttaccaacagatttttttattgaaagccgtgggggaaaaattgctaactcccatgacggtatgaccgtcttttatactattgttccggttactcagacattccgactggaggctgatttgacattagaacagattggtccggaggtgaatggaaaatcaccagcgggacaggagggagctggattgtttgtcagagatattatcggtcctcagcgacaggaacctcagtcagctggaacagaagaatatccccaggcctctaatatattgatgaatgcctttattacacagaataaaaagaatgataacttagtacagattacttcaattgttcgtgaaggagtaataaaaacatggggtaatgaaggtattacaattaagaaacagccgatcattgagaatataaactttacgcaaaaaagaaatattcatatgacgatcgagcgactaccagagaagttcatcctgaccgcttttgataccgatcgtaaagaaaatcagtcatggcaattttctgattactcaggctttatgaatcaactggataataatagtttagctattggtttttttgccgcacgaaatgcgaaactaagggtgaaaaatgcatcatttaaaccgggcaagccactggttgattacaaacaattaacttcacgtcaattcagtcgtgtccggcataaagcccctgaactttttcttgcttcacctcaatccgttgtaagaaactcaacaactcttcaatttttggccaatcaggctggaatagtcagtattgataatgataagcagactaagcaggtgcaggcgggtgaactggtacagtttccagttactttgcaaaaaaaacataatgacttcaccgtcaactttaacgttgatgggaatatatcaaaaaaagctatacgcatagagcaggttaaatcaaacctgactgatccttatgagatttacgtatgtagtgattgtcgacagggggccagaggcagcaaaaatgaccctgtagatttacagacagccgtaaaatttgtcgcacccggcggtaatatataccttaacgatggtcaatatcatggaattaccttagatcgggaattaagtggaatacctggcaagtataaaacaatttctgccattaatccacataaagccatttttataaacaagacattcaatctggatgcaagttactggcatctaaaatccgtggtctttgacggcaatgtggataatggaaataataaaccagcatatttgcgtatagctggtagctataatattattgagcatgtgatagccagaaataatgatgatacgggaatttctatttcagcgaaagataaaaaccgttttttctggccagctcataacttagttttaaactcagattcatataataatcttgatttatccgggattaatgccgatggttttgctgcaaaattaggtgtcggaccgggaaacatttttcgaggatgcattgcacataataatgcagatgatggttgggacctatttaacaaaattgaagatggtccaaatgcatctgttactattgagaattctgtagcctatgaaaatggcctgccatacaataaagcggatatcctaaaagggagtattggcaatggctttaaattaggtggtgaaggtcaaccagtaaatcacaaagttattaattccattgctattaataataatatggatggattcactgataattttaatactgggtcattgatagttagaaataatatagcaatgaacaatgcacgctataattatattttaagaactaacccatataaattcccatcatctatcctttttgataataattattcaatcagagatgattgggaaaataaaataaaagacttcttaggtgatacagttaacagtgtgaattataaattgcttgtttcacatgaaacaggaccggtacaaaaagatttatttttcacacgagatgatagtggaaatattatctatcctgatttttttcttaatatcattaataaatttaattagacaatgcccattaacctgctgcctaccggaagcaggttattccagaatggacactggcagtaatatatctttgttgacaaaaatataaaattttgttatgggattttatgatgttgaagaaaacgatatttatattaacgttattctctggcaacgtaattgctgcaactgtagaattaggttttgaaaatgagcaatataattatgcttatcgttctgcagatgtcttcatgccgtatattaagagtaatttcaaccctgttactgattctgctttgaatgtgtcactcacctatatgtatcaggatcaatatgggaaaaaacataaaaaaacatctgaggacagatttaaaaccaatcgcgatcgcatagagctctatcttaaaggttatactttaaataggggagcatattctttttctccttccgcaggtttccgttatgagtcatgggatgtaaactacgataatccgaaaaagcaggataagtggaaactggaactacgcttttatcctaatatgacttataaactcaatgaccagttaagcctatatatgaatggttttgttgcccctgtattttttaaaacacaacaagagtcgagaaaagataacaattatgtaaagggtaagttaggggcgaaacgttataacaacgattattatcaggaactccagattctgggtgtcagatataaatttaataatgataatacgctctgggcatcagtctataatgaaagaaaatataatcaacattcctcaaaatatgatcgctggcaattgcgtggaggctatgattttaaagttacagaggagtttgttttgagtccattcataagatatgacctctcttatagagaaaaaaacctcgaaagcacaagtaataatggtttatcaaaaaataataaagaaattcgaactggagccagcttttcctataaaattatcccttctgtaaaactggtaggagaaatatacaggcaaacaaccaacattgaaaactattatggagagcattctgaagacaaaaaccgcatgttctacaaacttggtataaacaaaacattttaaagccatataaagatattttaatataaatatattatataagtcttatcataattataatgtgtttatgggagatattgcagtaacaaaccttcatatattactattagtatagatttttcatgtcagtctggttcagtcagtgtaatatcaggcacatattttgagagagttaaatattatattaatgaagcgcctatagcaggtgcttcattatatcataagagatgatggctaccttgtgttgataagatacagcataataacgattccatttcatttttgttgtagggttgtttaacaaaaaatcttgctaacgggcttaattgatataagccagatattgtattcctgctatggctacattcatcgcgatgtgaagtaatataggcattaataggccattcgactttatttttgcactaataagaactaacgataccagaaataacatcaaaaatgtacgaaagtatgtatattgtagatgcaatgcagagattataactgatgttacaattgcagggatataaatattatcatggaaccagagtttaaaagagttaaaaagacaccctcgaaatacaatctcttcatatacaggaacaagaaatacagaagaaaatattttaatccataaaattgccccagaaaaagacatttgcgaaactatccactcttccgttttccttactcccagaagataagggacaaataattgaataattattaaagagaggagtgtaaaaaacatacagtcgaaaagaacctcttcctaattcttctctttttcggaagaaaataaaatgcagtgaaacaagaattagaaattcagcaagaaataatgctggaacaagaagccccctggatataagttcctgtttgtttgtaatgaatgcagaaataagagtaatagcgaataataaagtaaacattgaaaaacagctggttgatgactgttttttatagttgcatttttaatttttgttgtttttatttatattcccttacttgtcttcttaaattcttttatataacaggaagaggagaccatagcatgaacgtttcttctccggtatcagaacagctataacttttattttatagttgttatcagtgaatgaatgcaaactaatagaacaatgagaaaaagaatggagaaaaagcgacggaccggacgccatagttcatattctcgtgtatcagcctcacgtatcaacctttctgaaatggtttcggtttcctttcctcgcaccagaatatgcctgtaatatttcctcatgacatataccgaaaactgaaaccagattaatatggatggacacacaacacataaacttctgatgatatcacccgggaaagtatcttgggcgggtaaaagaaagtcatatactctgaataaaatcatcatcgagataaatgagacgccagcacctatccagtattcgatatgagaagatgcagcattatatgtgtcagtaaaatttttctttcttaatgaaggtggaagtgctgaaagttcaggaatgctttttcttgtccagtatattttcatatagcaactcatataaaaagtgttctactatgacgatttataaaaggcttataatgactacttcccctttcattctcgaatatcacgataatgatagagataatcattatcaattgatttcgtcagtaattttgacttatatcacacttttataatttaatcaggtgatttatttaataaaaagagagtgtttgtgggtgtcttgtgtatatgtcttactgggcatctgttcttacattaactaatgtattttctgatatcatactcagtctgaatttataatattaacaaatatattactatttaagttttggttgtattgccagtaacattcttttggttaatttagttattattcctcactgattaattgtccttccgttattattgtttgtaacttgtgtttgtatcgtacctttcaggtgttgatgcgcgctttactgtgtctgcaccggcttaacaaaattcaacagggtttgaaaaggaacatttcgtgcaaataaccgaagcattaatttcagagccgggagacatccagcgttttattcaacaggctgtagatcactgactgcgtctgttggccgtccacttcacgcgtcattcgaccagagtaaatattgatgattactagattcgtgtattttatcaggcattttacttgcgaataaatccccttgttatccagcgaaaccacacaggtagctattaccatatgtcgtaatgcactagttacaggaaaaacatgcaggttccgcaatacgttgtgtgttgctgcttagtcaggatcttttcttccatgcgagatacgacaacacttttgaagaaggatgttcgtaactggtagagttactacaacaggcatgggaggctccggctctgacagacattgtactgtggaatgttgttacaggttggggcggcaaccgtgccaggagaccatgagccgttcacggcattaaaggccacacttcagtcgtttacattccctgtggtggcaggcatcttccgttaaggcgtcagagcgttaccaacgttatgttgtcatggctcacctttcatagtcgatgcttatctggtgactgaaactagccgcagataaagagtgtgaagtttataccatggagtggagtgacgtgcaggcaggagattcgctctatgcagggttgtgagatgaattcaaaccggctgtcagcgccagtgatatttgaagattcgtccggttgttatccagtgtgcattaaaaacccagacattatggacaatacaacggcttccataacagggaggagcctgtttattatccgggcgtaatgactcacccttgtgggctttttcccgtcgcgcttttaacgttgaaggcattttctgcctgccgattcaggacagcgacaaaagccatatcagactattggtcaatgatgaccagcgtctggagtagatgataagccaaattgataagctggaatatgtgatgaaagtgcaacgtaatcagtccaatccgacgatgtttaacaagagtacggtgttttttcagtaagtcattcgtcttctgaatcaggtgtaatgacctttacagaagcattccggcagtgcgtaacataatctgccggtaacggacgatcgctaatcagaacatcaaatgcagagagcggtgcgaggctggcagaggctacttcatcgaacaaggcgtggcgggcgagcaaaattttccttagtccacgggccatcgctttacgcttagtggcaagatcttcgggattaaaccagctgacgccaaagtgatcatgtacaccgctggcggaaataaatatttttcgcggattgagagagtctaatggcgaagagttactggcatcgtaaaaagcatcacttctggcacgatacgtaccaccacaaagtattgctgtcacattaggtttttcattcaacgcaacaaagacacgatgtgagtaacagatgccagtgaaggtgattgcatccgggatcatgcttataacgagcggtatctcctggccattatcaaagaagatcagatcattttcattaaccattccggcggccagaattgcaataggtaagtcatcacgatgatttctcggaacgtcctggattactggcatggatggtgcgggtttatgcaccattacaatatagccacccagtagggtcagtggcagaggttcatcttcctgatggagatcgcgacgaatagtcattacagaaacttccagcattcgtgccgcgtctttcaaatggattctgtcggttttcttaagtatttcaatcaaacgtcggatacgctctttttgcttcgtttccatcaactctctctccgtaaaaatgttataaaaataacattatggcattagtaaacattgttttagttaccatactatacgaccgaccctttgaaatgaaaagggtatagactgctgaattttcggtattaatcctgttaggttgcttatgattagatagtgttggcctgagtgataagactggaagtctattaaataaacatcgggttgatgtgctaatcgcgatctcagtcacaaatgatgcaaaagtaacatgctaatgttatttaaataccattgttatgcgaaagtttataagaggtagtgaaatggacattgcagttattggttccaatatggtggatctcattacttacacgaatcagatgcctaaagaaggagaaactctggaagcacctgccttcaaaatcggatgtggtgggaaaggtgctaatcaagcggtggcggcggctaaattgaattcaaaagtcctgatgctgactaaagtaggtgatgatatttttgcggataatactattcgtaatctcgaatcatggggaattaataccacttatgttgagaaggtcccctgtaccagcagtggtgttgcaccgatctttgttaatgccaactcgagcaatagtatattaataattaagggagcgaataaatttctttccccggaagatatcgatcgagctgcagaagatctgaaaaaatgcaaattgatcgttttacaactggaagttcaactggaaacagtttaccacgcgattgagtttggtaagaaaaatggtattgaagtgttattaaatccggctccggcattgcgtgagttagatatgtcttatgcctgcaaatgtgatttctttatcccgaatgaaacagaactggaaatattaaccggtatgtcggttgatacttatgatcatattcgtttggccgcacgttcgttagttgataaagggctgaacaatattattgttaccatgagcgaaaaaggcgcattatggatgacccgtgatcaggaagtccatgttcctgcattcaaagtaaatgctgttgatactagtggcgctggtgacgcatttattggttgcttttcccattattatgttcaaagcggtgatgttgaagccgctttgaaaaaagccgctctctttgccgctttcagcgtcacagggaaaggtacgcaatcatcttatccgagtattgaacaatttaatgaatttttaaccttaaacgaataatcatcctgcacagttaaaggtagcactatgaacgataaaaacatcattcagatgcctgatgggtatctgaataagactcccttgttccagtttattttgttatcgtgtttattcccgctatggggatgcgcagctgcattaaatgacatattaatcactcaattcaaaagtgtattttcgctaagtaactttgcttcagcattggtgcagagcgcattttatggaggttattttttaattgcaataccagcatcccttgtgattaaaaagaccagttataaggtggcaattttaattggcctgacgctgtatattggtggttgtacactttttttccctgcctcacatatggcaacctacactatgttccttgcagctatttttgcgattgcgattggcctgagtttccttgaaactgcagcgaacacatacagttcaatgatcggtccaaaagcctatgccacattgcggctcaatatcagccagaccttttatccgattggtgctgcgtctggtattttattgggcaaatatctggttttctccgagggggaaagccttgaaaagcagatgtcaggaatgaacgccgggcaaattcacaactttaaggtgctgatgttagagaacacccttgaaccgtataagtatatgattatgattctggttgtggtcatggtgttgttccttttaacccgcttcccaacctgtaaagtggcacagacaagtcaccataaacgcccgtcagcaatggatacgctgcgctatctggctagaaatccgcgctttcgtcgcggtattgtggcgcagttcctttatgtgggtatgcaggtcgcagtatggtcatttaccattcgtctggcgctggagttgggcgatatcaacgaacgtgatgcttcaaacttcatggtctatagctttgcctgcttctttattggcaagtttatagccaacatccttatgacgcgttttaatccggaaaaagtattgattctctattccgttataggggcgctgttcctggcatatgttgcactggctccaagtttcagcgcggtctatgtcgccgtcctggtaagtgttttgtttggcccttgctgggcgacgatctatgcaggaacactggatacagttgataacgaacatacagaaatggcaggagcagtcattgttatggctattgtcggtgccgcggtggttccagcaattcagggatatattgcagatatgttccactcactacagctttcattcctggtttctatgctctgctttgtctatgtcggagtctacttctggcgtgaaagcaaagtacgtaccgcactggctgaagtcacagcgtcctgaggagaaccgttatgagtacgcgtattaatttgtggcgggcgctttttggcgagaaacctcgtatcttgctggaaaatagtgattttactgtcacgtcttttcgctatgacagcggtgtcgaggggcttaaaattgcaaacagtcgtggacatttgattattcttccctggatggggcagatgatttgggatgcgcaatttgatggacacggcctcaccatgtgcaatatgtttcgccagcctaaaccggcgacagaggtgatagagacctatggctgttttgcttttcattcaggtttgctggctaatggctgcccatctgcggaagatactcatctgctacacggtgaaatggcctgtgccgcgatggatgaagcatggctggaattagacggagatatgttacgccttaacgggcgttacgagtatgtaatgggtttcggtcatcattatctggctcaaccaacagtggtccttcacaaatcctctacactgttcgatattaagatggccgtaaccaatctggcttctgtagatatgccactacaatatatgtgccacatgaattatgcatatataccaaatgctacattcagccagaatatcccggacgaaatattaagattgcgtgaatcagtgccttcgcatgttaatcccaccgctcagtggctggcgtttaatcaacggattatgcagggagaagcctctctgtcgacgctgagtcaaccggaattttatgatccagaaattgtcttctttgcagacaaactggacgcttatacagatcagccagagtttcgcatgatctctcccgatggcactacgtttgttactcgtttctacagtgctgaactaaattatgtgacacgctggatcctttataacggagagcaacaggtagccgcctttgcattacctgcaacctgtcggcctgaggggtatcttgccgcgcaacgtaatggcacgctgattcaggttgcaccgcagcaaacgcgcacttttacagtcaccacaggaattgaataaccactcaaggcctgaacagcggcgcgcttatcgttaaggtaagcgcgcttttttacccgccaggacaagactatgatagcgttgcccttatagacgatcacattatcgtccactccaaatttgcgcaactactgtagagtggtgtactccacagcttctttgaggatctcaacttccattgttttcttaccgagcaagcactgcaactcttttatttatttgtagtggtcaacaaaaactggtcacaatttcagtttttttccagtatctattttccgattcgttcggcggtaatccaccgttatattcatgaggccggagtgcactataaaagtgtatgcgtaaaccgactgctgtatgtagccattaagccagtattggtaacataggtacccaccttttcaactagtggacacctgttatggaacaaaaaacattatcagctgaaccccgcaggtcattttcaaatgagtttaaacttcaaatggttacactggctttacaaccaaggggttctgttgcccgtattgcccgggagcatgatatcaatgataatcttctgttcaaatggctcaggctctcgctgatcaaagggcgtatatcacggcgtcttccgttaacgaactcttctggcattggcgttgaattattacctgtggagatgacgctgggatgagcggccttaccccgttttttacgcgaggtaattatgaagatcaatgactagccgtcgaaccgtgtgcatgaactgctgcactgaaacttctcagctgtaaaataatccttacgctacgtacttctcggagcgcttacaattaatcggatgcagtcctgactggaagaaagaaaaatggagaaaacaagaggaattaatatcctccacgttcctgaaatcctggaggatattaatgtcatcaaaatattagcgaacgataatccctaacaaaatacccagtgcgccaaagtcagcatcactgaaggtggtgttagcaaaaccaatatcacccagcaccggcaataagaatactggcaggaaggtaataagcaagccttgagcgaaggcacccaaaatcgcaccacgacgtccacccgttgcattaccgaatacccctgcagctgcacctacgaagaagtgcggcaccacaccaggaataatcacgatcatgttcagcagatacaacgtgaacataccgattaaacctgcagcaaagctactcaggaaaccaaccagtacagcgttaggtgcgtaagggaagacgaccgggcaatcgagagcaggtctggcattcggaaccagcttgtctgaaatacctttgaatgccgggacaatctccgcaatcaccatgcgcacaccctgcagaatgatgtacacgccagctgcgaaggtaatggattgcatgatagagaacatgaaccagtttttaccaccgctaagctctttcaccgcatctgcacccgcaaacaggcacgtcaccaggaaaattatgctcatggtaaaagagatagcaaccggcgtgtcgcgcaagaacagcagacttttcggcacattcatgtcttcagtcgagtgctctttattaccaaacttgctgccgatgaaaccggccaatacataagataatgttgagaagtggccgatggcaacgtcatcagaaccggtcactttcttcatgtacggatgcgcaatagccgggaaaaagaccattgccacgccaacaaccaaagagccaacggctataagcgtaacgccggtcatgcctgctgttgccagaattaccgctaccatcatcgacataaacaacgtgtgatgaccggtcaggaagataaatttccacggtgtgaaacgggcaatcataatgttgataaccatcgcaaagaacataatcatcgccatttctttcccgaagcttttctgcgctacggaaacaatggcttcattgttcggcacgacaccctgaataccaaaggcatgctggaaaatgtttgcgaagtcacccagtgacgacacaactaaacccgcccctgcgcctaaaatcacaaaccccataatggtcttgacggtacctttaatgcattcggttaccggttttttctgtgcaatcaggccaatcagggcgattaaaccgaccagcaccgcgggttcggaaagtacatcgctcatcaaaaaacgaaagaaatccatatcgcccccagcttacagtgcgcctaattcggttaatgccacggacaaacgttctctcatggctttcttatcaatcatattttccagggcgacgattttgcctgcgacagactgcgcgactaactgctcggcaatatctttggtgccgacatagatatcactcggcgtccctttcgcggagcccaggtcgacatgatcaacatcagcgctgatggacaaatccttcaaaatgcttttaatgctcatttccatcatcaggctggtgcctaagccgttaccgcaaaccactgtaattttcataaatgttcctcagaattaatagcgcgcaataacagacaaaatgtcctgcgtcgttttggccgtcaaaatagcctgtatgtctttttcgttatcgaataacttggcgagttgagaaatcgcttcaatgtggctggtactgtcggttgcagccagcacaatcagtaatttcactggatcgttttcatcggcatcaaaattcacacctgaagggatcagggtcagtgctaatgacagcttgttagccccctcttccgggcgcgcatgaggcatcgcaataccagggccaaccacatagtacggaccgatagtgtcgtgcgagtgatagatcgcatcaacataacgcggttcgatagaaccgttttcaatcaacggtcggcatgaaatcgccacggcttcccgccagtctttgacctgttccacgacctgaacgacctctgtatttaatagattttttaacatacgactgataactcccgatgataattaacaggagagtagatattttacgcattaattaatgtgatgattgtcgcatttgatagcgctatctgataacgctaccaatctttgtgatagcgctatcatttctctgccgccatgctttggctatattcggttcctgcatatacaatgcaacaggatatttgctaccgtgggcaaaaactggaaagagtaatggtaaaataaaagtaatgaaaacagctggttgtaattatccatggagtcgaaatggaaaaaacacgtaagcgccgtggtaccggacgggtgacgctgcaggaggtcgctaactttgcaggtgtcggaaccatgaccgtctcccgcgcgctgagaacaccggaacaggtttctgacaagctgagggaaaagatagaacaggccgtagaagagttgggttatattcccaacagaactgctggcgcccttgcatctggtcacagtcatacagtcgccgtactggttccttccctgacagataaagccagctcccgctttatgcagtcgttgcagcaggtgcttaataaaaatgaattccagctactgcttgggtgtcatgagtataatcagctcaaagaagctgaaattctgatgacgcttcttcaaggcaacccggcggcgttagttatttttggttctcagttggctgataaaactcaccagatactcgagaaaacaaatatacctaccgttaacgttgtcggttcccctttcagtccggctcaaattaccatcgaaacagcattttttgaagcatcacataaactgaccgaacatctgctggagcagggttataagaatatcggatttatcggtgcgcatatggaaaaccgcctgcaacgtcagcaactgaacggctggcataaagcaatgctgagccattaccagaacactgatcttgttatcacaatgccggatgccgcaagtctgcaattggggcgttacgcattaaacgagatattactgcgacaaccagagctggatgctgtgatttgcagccacgaagagattgcgctgggtatcatgtttgagtgtcagcggcgtttgttaaaaatccctggaaatatcgctgtagcttgtcttgacggttcagacagttgcgatcaaacacacccaaccttgacatccatccgtattgactacaaaaaaatggggatagagacgggtaagttactgattggactattgaataataatcatgatgaatcagaagagtcgcgtatcgtgcaattcaactaccagatagaattacgtcagagtacatgagcctaaaagggcactattgcaaagttagctattgtggtagggatagccgtttccggctattccccgcgcagatccggatgtgtgctgctaacgcatccattcctacttcaggtatttggcgtagaagcggatgctaaaaacttgccgtaaaaccgcaatatcagcccgcagtgtcgctctccagattatccattcctatattgatgacaacgacacgtaagactgtgactcaccaaacttggatgtttttctgagcttaaagctcgttgcgtgaataaggcgagagtcagcgaatctcatcgaggcccgcagcaccggctgcaatagggatatagagcagcaatctaccgtcaacgtcaaaaacacggaagccttgcaaacgggatgcgttcatataaacaacatggagcagcaacaatacgatgcctgttgttgctcagtcaggaccttttctgccatgcgcgagccagcgtcacgattgatgaagaatgttctcaactgattaatttactgcaacagacgtggctggtaataagcgctggcggacaatgcagggtgaaaggctgttttcgggttgtccggcctgatacatcagagcaatacgttgcgttaaaaacggctgttcagtctctgatgccacggggtattgcaacaatcatccggtgatggacgggagaaatatcgactcttccgttagtttttacagactgataaagttttgccagctgaatctttatacggaatgctcttcagtatgcatatacgaattgactatctggcggataaaaactgctttacagaactgaatgaatctccacgccttcgccggcagtggcaggatgttctggaggagtgccggcagacagaggccgggccagaagaacggctgcgtattgctctgctgaatgtggattacgtcaccagttttgaactgccttttcgcttgttgcttactcgtacaccacaactgattgccgcgctgcgtgaagaatgggacatcagccagaaaaatgtggtgttcaacgataaacgctttggctgcgtgtacaacctgaaggccagcctttcgggtgggccggatacattccggtatcatctgtctcaccgtattcggcgggtggttgcgaatgaaaacacatcatcgccataccaactgattgcccgggaagtgaaagcgccccgtcaacggctgaagtatgcgctggagacaggattgcaggtgagcgcactggacggcctgttctggttcggcagccagcgcattgcggcagatatcctgaggctgagaaagtacgggatgcggattgcgacggcttctgtggacgtgtatgacaacataaccggaacaactcgtcatatccctgtatattactcctgacgcaaaatagtctgtgggggccggagcatgaccggtaaccggaacagggttttgccctcgtcacagccaaaaatacgtcctttatcacatttcttcgatttttcctgatattttaccgggttactgttcaaaaatgcttctcttctgatgtaaatttctttactgacactttttgacatgaatttacactggcatcacacaggccagaatacggggagaacatgcagcaccggcagaaaaacattctgacgaaaacgtcccttttatcccgtgcgttgtctgtcccctgttgtgatatgttccggcgcggctctccgtggatatgctatctctccctctccgttttttctggttgtttcatccccgcattttcgtctccggcagccatgctgtctccgggtgaccgcagtgcaattcagcagcaacagcagcagttgctggatgaaaaccagcgtcagcgtgatgcgctggagcgcagtgcgccgctgaccatcacgccgtctccggaaacgtctgccggtactgaaggtccctgctttacggtgtcaagcattgttgtcagtggggccacccgactgacgtctgcagaaaccgacagactggtggcaccgtgggtgaatcagtgtctgaatatcacggggctgaccgcggtcacggatgccgtgacggacggctatatacgccggggatatatcaccagccgggcctttctgacagagcaggacctttcagggggcgtactgcacataacggtcatggaaggcaggctgcagcaaatccgggcggaaggcgctgaccttcctgcccgcaccctgaagatggttttcccgggaatggaggggaaggttctgaacctgcgggatattgagcaggggatggagcagattaatcgtctgcgtacggagccggtacagattgaaatatcgcccggtgaccgtgagggatggtcggtggtgacactgacggcattgccggaatggcctgtcacagggagcgtgggcatcgacaacagcgggcagaagagtaccggtacggggcagttaaatggtgtcctttcctttaataatcctctggggctggctgacaactggtttgtcagcgggggacggagcagtgacttttcggtgtcacatgatgcgaggaattttgccgccggtgtcagtctgccgtatggctataccctggtggattacacgtattcatggagtgactacctcagcaccattgataaccggggctggcggtggcgttccacgggagacctgcagactcaccggctgggactgtcgcatgtcctgttccgtaacggggacatgaagacagcactgaccggaggtctgcagcaccgcattattcacaattatctggatgatgttctgcttcagggcagcagccgtaaactcacttcattttctgtcgggctgaatcacacccacaagtttctggggggggtcggaacactgaatccggtattcacacgggggatgccctagttcggcgcagaaagcgaccacgggaaaaggggagacctgcccgtaaatcagttccggaaatggtcggtgagtgccagttttcagcgccccgtcacggacagggtgtggtggctgaccagcgcttatgcccagtggtcaccggaccgtcttcatggtgtggaacaactgagcctcgggggtgagagttcagtgcgtggctttaaggatcagtatatctccggtaataacggcggttatctgcggaatgagctgtcctggtctctgttctccctgccatatgtgggaactgtccgtgcagtggctgcactggacggcggctggctgcactctgacagcgatgacccgtactcgtccggcacgctgtggggtgctgctgccgggctcagcaccaccagtggccatgtttccggttcgttcactgccggactgcctctggtttacccggactggcttgcccctgaccatctcacggtttactggcgcgttgccgtcgcgttttaagggattattaccatgcatcagcctcccgttcgcttcacttaccgcctgctgagttacctggtcagtgcgattatcgccgggcagccgttgttaccggctgtgggggccgtcatcaccccacaaaacggggccggaatggataaagcggcaaatggtgtgccggtcgtgaacattgccacgccgaacggggccgggatttcgcataaccggtttacggattacaacgtcgggaaggaagggctgattctcaataatgccaccggtaagcttaatccgacgcagcttggtggactgatacagaataacccgaacctgaaagcgggcggggaagcgaagggtatcatcaacgaagtgaccggcggtaagcgttcactgctgcagggctatacggaagtggccggcaaagcggcgaatgtgatggttgccaacccgtatggtatcacctgtgacggctgtggctttatcaacacgccgcacgcgacgctcaccacgggcaaacctgtgatgaatgccgacggcagcctgcaggcgctggaggtgactgaaggcagtatcaccatcaatggcgcgggcctggacggcacccggagcgatgccgtatccattattgcccgtgcaacggaagtgaatgccgcgcttcatgcgaaggatttaactgtcactgcaggcgctaaccgtgtaactgcagatggtcgtgtcagagccctgaagggcgaaggtgatgtgccgaaagttgccgttgataccggcgctctcggtggaatgtacgccaggcgtattcatctgacctccactgaaagtggtgtcggggttaatcttggtaacctttatgcccgcgatggcgatatcaccctggatgccagcggcagactgactgtcaacaacagtctcgccacgggggccgtcactgcaaaaggtcagggcgtcaccttaaccggcgaccataaagcgggaggtaacctgagcgtcagcagccggagagatatcgttctcagcaatggaacgcttaacagcgacaaggacctcagcctgaccgccggcggcagaatcactcaacagaatgaaaaactgactgccggccgggatgtaacgcttgccgcgaaaaacatcacacaggataccgccagccagattaacgcggcccgcgatatcgtgactgtcgccagtgacacgctgacaacacagggacagataaccgccgggcagaatctcacggccagcgccaccacgctgacgcaggacggaatattgctggcgaaaagtcatgcgggactcaatgccggtacgctgaataacagtggcgccgttcagggagctaccctgacgctcggcagtacaacgctcagcaacagtggctccctgctcagtggcggtcccctgaccatgaatacccgcgactttacccagagcggccgcactggcgcgaagggcaaagtggatatcatggccagtgggaaactgaccagtacaggtttgctggtgagcgatgatgcactggtgctgaaggcgcaggatgtgacacagaacggtgtgctgtccggcggcaaagggctgacggtcagtgcgcagacgctgagctccggtaaaaaatcggtcacccacagcgatgctgcgatgacgctgaatgtgacaacagtggcgctggacggggaaaccagtgccggtgacaccctccgggttcaggcagacaaactgagtaccgcagcgggcgcacaacttcagagcggcaaaaatctcagcatcaacgccagagatgcacgtcttgcaggtacgcaggcagcacaacagaccatggtggtgaacgccagtgaaaagctcacccacagcgggaaaagcagtgccccgtcgctcagcctcagtgcgccggaactgaccagcagcggcgtacttgttggttccgccctgaatacacagtcacagaccctgaccaacagcggtctgttgcagggggaggcctcactcaccgttaacacacagaggcttgataatcagcagaacggcacgctgtacagtgctgcagacctgacgctggatataccggacatccgcaacagcgggcttatcaccggtgataatggtttaatgttaaatgctgtctccctcagcaatccgggaaaaatcatcgctgacacgctgagcgtcagggcgaccacgctggatggtgacggcctgttgcagggcgccggtgcactggcgcttgctggcgacaccctctcacagggtagtcacggacgctggctgacggcggacgacctctccctccggggcaaaacactgaataccgcagggaccacgcagggacagaatatcaccgtgcaggcggacagatgggcgaacagtggttccgtgctggcaaccggtaaccttactgcttcggcaaccggtcagttgaccagtaccggcgatatcatgagccagggtgacaccacgctgaaagcagccaccacggacaaccggggcagtctgctttcggccggcacgctctcccttgatggaaattcactggataaccgcggcactgtccagggtaaccatgtcacgattcgccagaacagtgtcaccaacagtggcacgctcaccgggatcgccgcactgacgcttgccgcccgtatggcatcccctcaacctgcgctgatgaataacggaggttcattgctgaccagcggcgatctgacaatcaccgcaggcagtattaccagttccggacactggcagggcaaacgggtgctgatcaccgcagacagtctggcaaacagcggggcgatccaggcggctgacagcctgactgcacgtctgacgggtgagctcgtcagcacagcgggcagcaaagtcacctcgaacggtgaaatggcgctcagtgcactgaatttaagcaacagcggacaatggattgcaaaaaatctgaccctgaaggcgaactcactgaccagtgcgggtgacatcaccggtgtggatactctcacgctcacggtgaatcagacgctgaacaatcaggcgaacggaaaactgctcagtgcaggtgtgctgacgctgaaggcagacagtgtcacaaacgacgggcaattacagggaaatgtcaccaccatcacggcaggacaactcacaaacggcgggcatctgcagggcgaaacgctgacgctgacagcctccggtggcgtgaacaaccgttccggtggtgttctgatgagccggaatgcactgaatgtcagtactgcgaccctgagtaaccagagcacgatacagggtggaggcggggtttccctgaacgccacagaccgtctgcagaacgacggcaaaatcctctccggcagtaacctcacgctgacggcgcaggtgctggcgaacaccggcagcggactggtacaggctgccaccctgctgctggatgtggtgaatactgtcaacggcggacgcgtacttgccaccggcagtgccgacgttaaaggaaccacgctgaataataccggtacgcttcagggtgcggacctgctggtgaattaccacacattcagcaacagcggtaccctgctgggaacctccgggcttggcgtcaagggcagttcactgctgcaaaatggtacagggcggctgtacagtgcaggcaacctgctgcttgacgctcaggacttcagtggtcaggggcaggtggtggccaccggtgatgtcacactgaaactgattgctgccctcacgaatcatggtaccctggccgcagggaaaaccctttccgtcacgtcgcaaaatgccatcaccaacggcggtgtcatgcagggtgatgccatggtgctcggtgccggagaggcattcaccaacaatggaacgctgactgccggtaaaggcaacagtgttttcagcgcacagcgtcttttccttaacgcaccgggttcacttcagggcggtggcgatgtgagtctgaacagccggagtgatatcaccatcagtggttttaccggcacggcaggcagtctgacaatgaatgtggccggtaccctgctgaacagtgcgctgatttatgcggggaataacctgaagctgtttacagaccgtctgcataaccagcatggtgatatcctggccggcaacagtctgtgggtacagaaggatgcttccggcggtgcaaacacagagattatcaataattccgggaatattgagacgcatcagggcgatattgttgtaagaaccgggcatcttctgaaccagcgggagggattttctgccacaacaacaacccggactaacccctcatccattcagggaatgggaaatgctctggttgatattcccctttcccttcttcctgacggcagctatggctatttcacccgtgaagttgaaaatcagcacggtacgccctgcaacgggcacggggcatgcaatatcacaatggatacgctttattattacgcgccgtttgctgacagtgccacacagcgctttctcagcagccagaacatcacaacagtaaccggtgctgataatccggcaggccgcattgcgtcagggcgtaatctttctgctgaggctgaacgactggaaaaccgggcgtcatttatcctggcgaatggggatatcgcactctcgggcagagagttaagcaatcagagctggcagacggggacagagaatgaatatctggtataccgctacgacccgaaaacgttttacggtagctatgcaacaggctctctggataaactgcccctgctgtcaccggaatttgaaaacaataccatcagattttcactggatggccgggaaaaagattacacgcccggtaagacgtattattccgttattcaggcgggcggggatgttaagacccgttttaccagcagtatcaataacggaacaaccactgcacatgcaggtagtgtcagtccggtggtctctgcacctgtactgaatacgttaagtcagcagaccggcggagacagtctgacacagacagcgctgcagcagtatgagccggtggtggttggctctccgcaatggcacgatgaactggcaggtgccctgaaaaatattgccggaggttcgccactgaccggtcagaccggtatcagtgatgactggccactgccttccggcaacaatggatacctggttccgtccacggacccggacagtccgtatctgattacggtgaacccgaaactggatggtctcggacaggtggacagccatttgtttgccggactgtatgagcttcttggagcgaagccgggtcaggcgccacgtgaaacggctccgtcgtataccgatgaaaaacagtttctgggctcatcgtattttcttgaccgcctcgggctgaaaccggaaaaagattatcgtttcctgggggatgcggtctttgatacccggtatgtcagtaacgcggtgctgagccggacgggttcacgttatctcaacggactgggttcagacacggaacagatgcggtatctgatggataacgcggccagacaacagaaaggactgggattagagtttggtgtggcgctgacagctgaacagattgctcagcttgacggcagcatactgtggtgggagtcagtcaccatcaacggacaaacagtcatggtcccgaaactgtatctgtcgccggaagatatcaccctgcataacggcagcgttatcagcgggaacaacgtgcaacttgcgggcggcaatatcaccaacagcggcggcagcatcaacgcacagaacgacctctcgctcgacagttccggctatatcgacaacctgaatgcggggctgataagcgcgggcggtagcctggacctgagcgccatcggggatatcagcaatatcagctcagtcatcagcggtaaaaccgtacaactggaaagcgtgagtggcaacatcagcaatatcacccggcgtcagcaatggaatgcgggcagtgacagccaatatggtggtgtgcatctcagcggtacggacaccggtccggttgcgaccattaaaggcactgattcactttcgctggatgcagggaaaaacattgatattaccggggcaacggtctcgtccggtggagaccttggaatgtctgcgggtaatgatatcaacattgccgcaaacctgataagtgggagcaaaagtcagtccggtttctggcacactgatgacaacagttcatcatccaccacctcacagggcagcagcatcagcgccggcggtaacctggcgatggctgcaggccataatctggatgtcacggcatcctctgtttctgccgggcacagcgccctgctttctgcaggtaacgacctgagtctgaatgcagtcagggaaagcaaaaacagtcgcaacggcaggtcagaaagtcatgaaagccacgcagctgtgtccacggtgacagcgggcgataacttcctccttgttgccggtcgtgatattgccagtcaggctgccggtatggctgcggaaaataacgtggtcatccggggcggacgtgatgtgaacctggtggcagagtctgccggcgcaggcgacagctatacgtcgaagaaaaagaaagagattaacgagacagtccgtcagcagggaacggaaatcgccagcggtggtgacaccaccgtcaacgcaggacgggatatcaccgctgttgcgtcatccgttaccgcaaccggcaatatcagcgtgaatgccggtcgtgatgttgccctgaccacggcgacagaaagtgactatcactatctggaaacgaagaaaaaaagcggaggttttctcagtaagaaaaccacccgcaccatcagtgaggacagtgccacccgtgaagcaggctccctgctgtcggggaaccgcgtgaccgttaacgccggtgataacctgacggtagagggttcggatgtggtggctgaccgggatgtgtcactggcggcgggtaaccatgttgatgttcttgctgccaccagtacagatacgtcctggcgctttaaggaaacgaagaaatccggtctgatgggtaccggcggtattggtttcaccattggcagcagtaagacaacgcacgaccggcgcgaggccgggacaacgcagagtcagagtgccagcaccatcggctccactgccggtaatgtcagtattaccgcgggcaaacaggctcatatcagcggttcggatgtgattgcgaaccgggatatcagcattaccggtgacagtgtggtggttgacccggggcatgaccgtcgtactgtggacgaaaaatttgagcagaagaaaagcgggctgacggttgccctttccggcacggtgggcagtgccatcaataatgcggttaccagtgcacaggagacgaaggagagcagtgacagccgtctgaaagccctgcaggccacaaagacagcgctgtctggtgtgcaggccggacaggctgcgacaatggcctccgcaaccggtgacccgaatgcgatgggagtcagcctgtcgctcaccacccagaaatcgaaatcacaacaacattctgaaagtgacacagtatccggcagtacgctgaatgccgggaataatctgtctgttgtcgcaaccggtaaaaacaggggcgataaccgcggagatattgtgattgccggaagccagcttaaggccggtggtaacacaagcctggatgccgcgaatgatattctgttgagtggcgccgcaaacacacaaaaaacaacgggcaggaacagcagcagtggcggtggcgtgggtgtcagtatcggtgccggtggtaacggtgccggtatcagcgtctttgccggcgttaatgcggcaaaaggcagcgagaaaggtaacggtactgagtggactgaaaccacaacagacagcggtaaaaccgtcaccatcaacagtggtcgggatacggtactgaacggtgctcaggtcaacggcaacaggattatcgccgatgtgggccacgacctgctgataagcagccagcaggacaccagtaagtacgacagtaaacagaccagcgtggctgccggcggcagttttacctttggctccatgaccggctcaggttacatcgctgcctcccgggataagatgaagagccgctttgactccgttgctgaacaaaccggaatgtttgccggtgatggtggcttcgacattacagtgggcagacatacccaactggatggtgcggtgattgcctccactgccacaccggataaaaaccacctggataccggaacgctggggttcagtgaccttcacaacgaagcggattataaagtcagtcacagtggaatcagtctgagcggtggtggcagcttcggggataaatttcagggtaacatgccgggtggcatgatatccgccggaggtcacagcggacatgcggaaggaacgactcaggccgcagtggcagaaggcactatcaccatccgggacagggacaatcagaagcagaatctggcgaacctgagccgtgaccctgcgcacgctaatgacagtatcagcccgatatttgacaaggagaaagagcagaggcgtctgcagacagtggggcttatcagtgacataggcagtcaggtggcggatattgcgcgtacacagggagaactgaatgcgttgaaggccgcgaaggaagcaaccggcgaaacacttcctgctaatgcaacagagaaacaacgtcaggaatatcttgcgaaactgcgtgacacgcaggcttacaggaatgaaatggcgaagtatggtaccggcagtgaaattcagcggggtatccaggccgcgacagcggcgcttcaggggctggcggggggtaatttagcaggtgctctggccggagcttcagcaccggaactggcacatctgctgaaatcaacagaaaaagacccggcagtaaacgccattgctcacgccattctgggcggcgcagtggcggcaatgcagggtaataatgtcgctgccggtgcagcaggcgcagcaacgggagagctggcagccagagcgattaccggaatgctgtatcctggcgtgaagcagtcagacctcagtgaagagcagaagcagacgataagtacgctggcaactgtgtcagcagggctggcctgcggtcttaccggaaacagcaccgcatcagcagcagtgggagcacaaagcgggaagaatgctgttgagaataactcactcagtgatggctggaacaatatcctgccatcaggaacacaggattacggacaggccgtagcctcgtggaatcagtatgctcaggacaataatctgacaccggagcaggttcaagaagggatgaatcgtatagctattggtgaagggccttcttgggggacaacatataaagtacacccggtagttcaggctggcggtgatgttagctttatccggggttatactttaagcggaactatagatgacaatcatatttcagttaatcaaggggatatttatagtataggtgctcatggcggagcctcgatcggattatcctttggcccgtatttcccgggattaataaattcaaatgataacgattattcgataaatggtggttttggcgttggtgcagtggggctttctacgggtaaagatggtgttagtttcacttttggttttggcccaagttggggttggagtgcaactgaaattaaaggcgttgacgttaatggcacttcaacaagtgaggtttatcgatatgattttaaataatttttatagtttactatttttattgatgcttgcgctgtcaatattttccttcacagtgctatttgctttgtttatatataaagatctcggtggtgtaaaatttgcccgggactcttttttgttttttgattatatattttttagttctgacatgagagcaaatgcctctgcactatcggttatctgtgtttttatatttggattggcttttgatcataatcgtaatccacttgttaagaattacttggtcgatatagtatggtttttaggtgttgttttattttttatacactgtcgttttttttctaatctggaatatggtaagacaaaaattatttttgtaagagagctttttttcaacctaaaaataaaactaaggttaatatttttatggttgtcacgattattattcatcatattgatattaaatcgtttttatcgttgatttgttgttgagaataatttacttggcggtagtgaatatgctcatgctgcgtggatacgccagcatggtatcgacatggcgacatgtacagaaaactcttccggtgccgcctgccagaaagcaatgaatgagagggatgctgtagggctggctttggcaacaggtactgtggcactactccccggtagtgctcaggtaatgtggggacttggagcaagtgcgaatgctggtatcagttatctggctgatggtactgtagatccggcaaacgcagccattgcaggctgggggaatgtgttcagcatgggtaatggcctggcggggactgtgggctggaatgctgcaggtggtgcgctgggtaactggatcggcaacaaagatcctctgtctggtgcaatttcaaatggtatcggttctgctgctgggtatggtatcggtaaaggtattacttaggggacagataagattacgaatgctgtaggaaaatgggtgacaaatggctgggatcctaagtacgatccaacatggataaaatatgctgaagtaaatcgtaacgatatcattcgagaaggcatgaaaccgagcaatattcctggaactgctggagatattggcggttctataggatccgagctaggtggaaaagtaacagataaagtatctgaggaactcaagaaatgaaatattcttttcgagtggtaataggtaagtttattatatgcagttcaattctcttattgtgttttattggcatgatcttagcggccataataactaaactaacgtttgtagcgttagcatggtttcaaagcgggatttttgaagttttgtggagcgatattgtttatgctgctcagttgggtggtctggggggggggcatattaggtttttgttgggttttgttatatctttttagggcaaagggctttagttgagaataactacctgagcgtgtctgaaaagacagaacttgagatagcaaaacagacgcttaaaaacagtaaagatccggcagaacgtgaaaaggtacagcagaaatatgatgcattgcttgaaaaagatattgccagtgataaggaggttattgctgcctgcagtaatggtaatgcggggagttcagcgtgtgctagcgcaaggctgaaagttattgcgtcgaaagaagggtacgaagatggcccttataagagactgtaattaaaattgtgtaattgcctgtttttgatatgttcactccaacaacggagacaggcaaacgatggacgaaaagaaacttaaagcccttgcggctgactggccaaaggccttaaaaccgaagccgacctcaaccagttttcacgcatgttgacaaagcttaccgtcgaaacggcgctcaatgcagaactgactgaccatctcggtcatgagaaaaatgctcctaaatcaggctctaatacccgtaatggctactcgtcaaaaacggtattgtgcgatgatggcgagatcgaacttaacacgccgcgtgaccgtgaaaataccttcgaaccgcaactaattaagaagcatcagacacgcatcacccagatggacagccagattttgtccctgtatgccaaaggcatgactacgcgggaaatcgttgccacgttcaaagaaatgtacgacgccgatgtctcgcccacgctgatatccaaagtgaccgatgcggttaaagagcaggtctctgaatggcaaaatcgaccgttggatgcactgtatcccattgtttatcttgactgtattgtggttaaggttcgtcacggcgggagtgtcattaacaaagcggtgttcctcgcgctgggcatcaataccgacggtcagaaagagctgctgggtatgtggctggcagaaaatgaaggtgcaaagttctggctgggtgtactgactgagctgaaaaatcgtggccttcaggacatcctgattgcctgcgtggacggcctgaaaggcttcccggaagcgataaatagcgtgtacccgcagacgcatattcagctctgcatcatccatatggtgcgcaacagcctgaaattcgtgtcgtggaaggattacaaagccgtcaccagcgggctgaaagcggtatatcaggccccgacagaggaagcggcgttgatggcgttggataagtttgcaggcgtctgggatgaaaaatacccgcaaatcagcaagagctggcgcacacactgggaaaatctcaacaccttcttcggttacccaccggatatccgcaaggccatctacacgacgaatgccatcgaatcgctgaacagcgtcattcggcaggcgataaagaagcgcaaggtgttcccaacggacgactcggtgcgaaaagtgatttatctggcgatacagtcggcgtcaaaaaaatggagtatgccaatccagaactggcggctggcaatgagccgttttattatcgagtttggtgaccgccttagcgagcacctttaatacggcggcagttacacagaattatttacagggtcgactgggaacatattcaggcagtgtatctgaatccagaaaagaaacagcataatgtaattttattacaaaaggcgacaattagcttgaaaaacgccgttattgggtgttctactaccatgaaaatacgcatttttcacaccgcacattacgaaactcgcatcacggagaatgaaagctatcagacactggttgctatttttgaccacagaaggtagtgctgtttaccgccagagctgtgctggcggggagcgaatccgaaccatgtcgataattgtcaccggccagagaactatgtggcatcaattttgctgaaaaatactgcagcaatcagaggactgacgcccgggatttttaaacaaattcagttttcatcgtagtatcactttatcagccaagtcataaagttcagctgtattttgggaggtaaagcgatattatgattatattttatgtttgatagaaatatttcagggcagatacaataccatgggtataattcagttttttcagacacaaacaaaaataactattggatacattatttctgtcacagctttcttgttttgagtaaccataaaccaaatattctctaagagccactattgttttttcacttctgattggtgatatttcaatcagaagcgaaaagtgctcatcatttacacttgctcgttgtaatcctgaattatatgttttttttgcataagaagaataacgcatatacacactcaccaacttgtatttataaaatcattttgtaattcattatgtaatgaaatcaccttactccccttcaagttataagacatgaaagaataatttttttgcaatgtaagtttttacaaaacatgaataatatattcatggctcatacagaactaccataagaaggatgattaagaaaatactgttttatattttaagaatctctgagaaaggctgccttccggcagcctttcccccacatcagaacatataccggaaatttgcgtttaccgcattatccacgttatatttaccaaaggctgacttctcaaactccagaccaaagcgcatattgtcctttatctgcgcattcataccaacattaaacagcatccggctgtctttctcgccttttatccgtttctccccggacgcatcacgcagtaccgtctcaccattattcagtaggtcaaactgccagctggtcccggcacgggccgtcacactccagtccttaccactgaaggtcttgcccagttcaatccctgttcttccaatcagcggactgaagtccctgttcttcatgctcaggtccatatcaccgtctttccagcggaatgttttcccggacacggcgccgtaaaccagttcagcctgcggctcaatgaacgtttcctctgtcaggtgatagcggtaacccgtttcagcaccggcataccaggaatgggtgttgtagtgtttcgttcccagaccggcaaagttacctgtgtaatcattgtcatggtgaatatatttaccaatcaaatcgatataggcaccggactcaaacaatgctgaagcatacagaccgccccccaccgatttcgtcttgccgctgaacgcatggctgtctgcactgctgtcggtataggtcatcgtgacaccggtaaacaggtccactccgtccagttcatgttttttgtcaaagccgacctgaacatgggtgtaattatcactgtaaccaccgtctgcagaaccggcaccactcatgatgcgcgcccaggctccggcatcaccgtttgtgtcacgcaggtcacccatacgtttgttcagattgttgacttccgtcatgaagtttttatacccggcattcatgaaactgtcagccttcgcggcagcggctttatcagcctccgctttaaaaccgtccagtatccacttcgtattgccaccactggtgtcaacatgcagggttggagtcacccgactgaaacctatcatccgggtgccggccttaaacatctctgctgaagttcccgccggtgccgtgaccagaggaatattcagggactgtccctgagccggatccttcataaagctgacgttcaggctgttatctgaacccgtggctttttcagtcacattaattttatcggcatttttcaggtccgtacgcagaacaaaatcactgcctgttgcatccagtttattcaccgtcagggtacggaaagtacggtctccttcagaactgatacggctgtttctgacggtaagagtgtggatggcggagtccccacccagagtccacagtgcattatgcatactgacatcagccctgccaccggttatggcaccattgaatgctgcgttatagccctcaagaagactgccggcaaacgccgatgcagtcgtttccgcagaagccagttctgccggcgtgtcagacccgatggtaactgttgatgccgcagaggcatgaatatcaccggaagcatgtgctccacgggtaatttccagtgttgcgttatcgccggtcaggtcatatccgtccgtcagatatacagcaggggcatactggttagccgtatctttaaccggtgtaccgctcagggtgattttgctgttcttaccggcctgaatatgcccgtcgctgaaaagaccgttcagtgctgtaagatgaccgccatcatgcactgtcagtgaactgccggcaaaagcacccggggctgttaacaggacgtccggagaggtgatactgacggcactgtcataagcttcaatccctccggtgaaccggctgccgatatccagggttgagttatggtccagcgtaatattcccttcatactggctcctgtcattcacggtgtccgggacagaggtaccttcctccagaatgacataatttcctgttccgtcatttttatccacaaataccctgtcacttcccagtgtgatatggctgttatccgacttaatgtcactgttcagcgaggcgttacgtgaaagatggaagtcagcatctttcagcgacagtgttttcattatgaactggcggttttcccagtctttctggttcaggctgaccggcgcactgccactgacggaggcgtggataaccggatgcccctggaatatcagggtgccactgtcctcactcagggtaccttccggcaggttcacgctaccatcaaggatgacctttcttccccccggcagctgtggaatggtgacatccatattcccggtcagctgaccatgaaagataacgggttgttttgcccgcccggccaggatccggtcttttactgtctgaactgctttgtttttgtccgtgccaacaaattcccactgagccgggtcattcaggctgttcccccacagggtgttaccatagctggcagatttcagaatatagaagcgggtctggccgttgagtatcatgctgtataggtttcccggtgtgccggtaccgccaaagggggatatactgccaatcggaacactgacatttgtatcctgagccttaagatccagtaaaagccgggatttttgctgtgcattatttgtaatcaccgccccgtaatcggcagcctgcagtcgggtgaaggtaacggcattaccattaaggtcaagcttacctccccggtatccccatgaaatgttatccggattgacctgacgggcatctccgagcaccacggtcggtcgtccgctggcgaggttcacggaactgaaggcctgaacattacctgcagtgtctgcctgctggttaagtacaacggtaccgtctcccgttttcagtcctcccgggtttacacctgttccgtttatggtcagggttccttcccccaatttatgcaggttgtcaccggcaaccccgttgaccttccaggtcacattcgtccccttgtcagtaataatgccggcacccgtccaggtttttccggattcagcagatacggtgtaactgtctttaaattcgagataaccggccccctgagtcacactgtctttcaggacaattgcaccgttctgcccgctgaataccagatttttaccggcattgagatcattgtctttctgcccgtgcatggtccagtttttactgccctggctcagggtgcctgtgcctgatgttttgtcgtatgtccagttcagggggggcagtccggaaacaaagtccacgggggcatcgaaatcgtcctgcataacctggttcagataatctgttggtatgacattccaccagttcgtagcaccattaatacctgcatatgctcttaatacagcaacaataacccattttttttgttgttcatcataagcaaacaaaggagaaccactgtccccaggggcaccatagtcaggtaaaggtccgtttacaggattataggtttgcccgggattagagactattgttgcatcagatatcagaggaactcctgtggttcctcctgttttaaaagcatatccgccggcaaccttaactaaatttccgtccttgtccttagtgtactgcgtaccactacccacccgataaaaagcggtgtaacgttcagtgtctttataagcattggctttggttccttctgatgttatcgctgagggaataacttctgtaaccagtttattcagacgtggagcatggaagtcaacagaagagtggttattacggtcaacaagggaatatgtatttttcccattaccaaagctcacactctgatatcctccgttatgctttacgctgacgatatattgaggtgatacaagcgtagcaacgccatttgagctcacactgctgaaatcggccattggggctttatccagtctccccacaagttttccgtccttatcatataccggaatatctgtggcaccaggtacaaaaagccctttgttttcagcgaaatcacgataaatctgataggcaatatcggaacggacaatgcccgcctgggatatctgagggtaatacagatagactgctggaatgccagccagaagaatatgcgttaatcttcggcatgtcttttttattaccctgctggcaagttcagagacaacaataagtcccccggtgacagggcaatatttaagagaataaactttattcactgcggactctccatgatgtttaagtactaatgataaccagacgttatcacccgggcggaaaatatagtgactgcattaatgtatttttgtgatgtctgttacatagtgaaatacttttcgtttgcttacaaaattaccgctcctgcaatttttttcacatatgcggtattgtttttatatgtttttattactgccaccattaattatactcgtgatttttacttataaaaaataaacataacccatctaattttataacattgttaccctgggtatttacttaagagtattaccagagggtgattttatccggatatgacaagtataggttgcctcattcagtattcataaattatgtttaccacggagtacccgacttcctcatcgattgtcctcggatgactatttttattgtaaatgtaattgagatactacagcattttgtttaaatgccattctgttcataatcacttgtgcgatgtgcataacaccttaagtttttaacgactttctcgctgaaatactattttaaaacttcattttatgtctatatcttttaatggggtaatgttaaataaaaatttatttttttattggtgataaagaatgaaaatgcatgcaacaaccggcttttattgtcattgtcatttgtaagattcaaaaaaatcggacatttcttataatttcccagtgataataataagaaataataaatattttattattgttaccttcttttgttgtgatgagcatcacaatttattcctgaatcaattcattatgtatttgaattagttaaaacgtgcgcttaacgcgcaagctttccgtttccaagactgcctgggtatggtgaatcaggtctaacggcgcttgcaaggccaacaatcaacgaattaagcgccagacgtatggtcaaaagtagtggagtagaaaagggggaattatttgttggagtgcaaattcgccagctggtactccctttccctctggaagctcccttgtgcgtacctctccgcctttctcccttcgggaagcgtagcgctttctcatagctcacgctgttggtatctcattttggtacaggtcgttcgctgcaagctgggctgtgtgcacgctccgttcgcaagcttgcctgctggttatacctgatgatgaaattattctgactcagaatgtgttatctttgttacagaaatattgctctcattaataagcagcggtgtccagctaatcactagaactttgcggtattactctgtttcctgcgtggtcctagatttgttccggataaaaacaattctcctctctgtggagttgtatccaggatgagatatacgtctccgtcctgaaaaagcaagtaattaatcaaaaatgtattttggttccatacatatagtatgtaatatcattcagacgcttacttaacttatttttagcatgcggtatactctaccgcgataatgcaaccgtacaatattgtgattgtgcgcttcccaaacgctgctctgtgactatctcatcattatttgtcaacgacggatgaaaagtagctcttccgcaacctgggtggaagaaaatggatgaaactttctggtgaacaaggatctaagctgttttcagttatgggcaacgcaatgcactctcttaagacacttctacagttaccttgcggatggtaatgcagtcgacaaattattagatctgacggtataaccctccatctccgcggaaaacgcaaaacagcgcaatgtcctgaatgctttaagcgtagcgattctgttcatagttgtccccggcgccggatacagcatctaccctgcacaggccagacgctatggcttgtattttccgtccgccactggtactgccgtaacccggcttgttcacgtaaaatttttgccgggtcgcttgctcccttagccagttcacaccagcagtcttcacagtcgttacaaaatttacagcgtcagatgggattaatagccggaggtgaggctggaaaacgggcagcaacgacagtgggtctccgttgcagtgcagatactcttcttcgcaggcttataataccctggagacgaaactgtcaggctcgccccatgtcggtattgatgagtggcgtggcatcggggccactgctgcggtatgttaatagtcaatcttgatactcaccgtcccctcgtcctgttgcacggtcgcgatcagcatacgctggcgacctggttcagaaaatatccggaaatacaggttgtctcgcgtgatcgctgcggaatcaatgcgacagcagcacgtgaaggtgcacctcaggccagacaggtagctgaacgatggcttctgctaaacaatattggcgatgcgcctgaacgaatgatgtacagacatatgactctgatacgtcttgttaccagttagttgtcaccaaaggaataacccggggcaaaaccatctgtgcctgcagtatcgctccgtcgtccggaacgccttaaacagcaaacccgcaaaaaacggcatcagctttggacagaggttatggccctgcataacaagggatgtagtttcagggaaatatcccgtattacaggcctgtcgcgtgtgacagtcagtcgcagggggcgttcaggaacattccctgaaatgtcaacccggcctccaaagcgagggcttctggacccatggagggagtggttaaaagagcaacgagaaagtggtaattataacgccagcaggatatggcgggaaatggtggccaggggggtacaggcagtgaaaccatcgtcagggatgctgttgccaaatcgcgtaaaggctggatcccaccggttactactgccgtcagacttccttcagacttccttcagtgtcccgggtaagccactggttaataatcaggggtgaagaaaattatgcttcccgatttattagtctgatgtgtgaaaaagaaccggagctgaaaatagcgcagcaactggtactcgagttctaccgtattctgaaaacccaaaataaatcacagctaagcagcttgttcactcgagtccacgaaagcggctcagcagaacttcggtgcgtggctgcggggatggaagctgatgctgcggctatatgtgaggcaatcagcagtcgctggagtaatggtgttgtcgaaggtcatgtaaatcgcctgaagatgttgaaacgccagatgtatggtcgagccggatttgaactactcaaacagagggtaatgagtccactggcatgagaatctccacccaggttgcagaagagccacttttccagttctgcatcagtaagtggaggtgttttttgagattttgtcatgtctttgctccggcctggttttatgttcagaagaccttcttcacccagtgccggataacggattcatttgagatattaaaccgtgcagcggcctcgcgcgtggtaagttcttcactcagagacttcaggacaaccgtcagtcgaaactcaggagtgtggaggtcatttttccatgtgatacgatcaatatcgtggagttaccagtctcttaccttacccagcagatgttttttcaacaccaaaacgtttagcgatacgacgtgcgccatcgtgtctggaaagataatgattaactacaaccaatctggtttcgagagaatattttggctttgccataaaaattgcacattaatcagttgggtctccaagttttggggtgcagtccacgtacaataaatttttatatccaccccccctttaatcactaccgccttggtcgctacatgatggataacaataatatctataatatagatattatctgcatataaaaattgatttttaccaaaaaaatgcccatttgttttattttataaataattttttgttttgagatttcacttttttagataaaaaccctacagagaagtaattttttagatgtaatctctagtattattggttttattggttttaaatttcatttaatggttttttgattgagggcaaaaaaaatttgatgcaaacaaatatgtatttataatgtgaatcaataataaattaaacattgaataatgtgtaatggtatggcagatcatatacagcggaatacgctaactcattatcgatttaatgtaaaaccagctataaataacatttcaaatgaacacttctggttactaatagaattatctggaattcgaagtgataagatcattatgtcattaagagagcacttagtagatggttttacaaaacgagaagtatgtgaaagaaacgatgtttcactgagttatttttctattagcttaaagaaaatatctcatatacataatgtctgcgcattgctaagtgaatattataataatagtttttagtgcaaaagcacggacaatcacgttattaatattttaaataaaaatcataaaaatgaagcgtaaacatttgttattattattgttgttttcattttccactaacagtgcgcctctttactccttaattagggaggcagttatgcacgatcccatagtaatggaagcccgggcggagttaacttcggcacaatcccgcatagagcaggcaagctctgcacattggccagttgtcacagctacaggaagtaaactcctttcacaaagtcaccgttattcctacgattatgacactgaagatattttacccggtattcgtggtgaagtgaatatatttgcttcaggggctattgaggcggatgtgcgtcggagtgagtcagaagccgaatattatcattataaaatggaagaaacaaaagaggaaacaattcactcttttgtttcattatatcttgatgcactcagggaaaaacaatccattgcggtacttgaacagagcctttcccggcataacgcaattcttaatgacctgaataccatcagtattcatgataccgggcgggagtctgagcttgttcaggccgaagccagaaggttgatggttcggcagcagataaattctaggagcagagtacttaaaaccacgctgggaaaactgtccacttggacaaaaaatccggtaaccgaagctgatcttgaaaatcctttttctaggatgacagaggccaaattattaactgattttacacaggctccacagaaaggtaacccgtcgtggcttgccagccaagctgatgttgagagtaaaaaagcggcactgaaagcacaggagcttgcccggtaccctcgggtggatttaacggggtctgtaacccgggatgaccagcagataggggtcaatctgtcttgggacctctttaaccgtaatgccagttatggtgttacagaaaaagctgcgcaaatagtggcagctaccggacgactggactctgtcgcccgaatgattgatgaaaccgggcgattatctctgataacagtcagacaaagtcgaggggaaatggaaacgctcagacgtcaggaacaggcttcagccagagttgtggacttttatcgtcttcagtttcaggtggcaagaaaaacactgattgaattactgaatgctgaaaacgaactgtacagtgtcggactctcccgggttcagacggaggatcagatgctccacggtatgctggattatctgtattcccagggaatgctcctgaaatggagcggagtgaatctttctggtgaagaagaaaaataacggggttgaagggttggtaattaagtgaagagtatttttgaaggattatcacagataacggcgttactgggtacacctgtatctgctgagactctggctgccggtactgtccgtacagatgtatccgggattgattttcgttctgttggcgagtttcttcgtagtgaaggatttgataatcatctttcccggcgatctccggaagatatcccgtcacttgcggttccggcgcttcttttattgaacgctcaggaagctattgtggtagtgcgtattgagggggccggtctggcaagacagtatcatgtgcttcagcctggaggtctccgtaagacactttctcacgatgcattaatggccgtttattctggttattgttggtttgttcagccacaggcaaagcaggatcgtcgctcggagctgccagagtatgacatgagcggggcatggttctggcgggtactgtggcgattcagggcatattacggacaggttattgttgcgagttttatcattaactttcttgctctggtcagttccctgtatgtaatgaacgtctatgaccgggttatacctaatcgttcctgggaaacgttatggatgctgagtatcggggtgattacagcaattctgtttgagtgtgctgcaaagttaatccggagttatctgacggatgttgcgggtaagaaggcagacctgattatcagctctgctctgctacgtcgggtgatggcggtaaaaatgtctgacaggccggcatcctctggttcatacgccagcaatttgcgggaatatgagtctgtcagggagtttatgaccagcgctacgttactggcttttgttgatctgccttttattctgcttttcatcagtgttatcgggctcgtgggaggctggcttgcggttgtacctcttacgctggtcccgctggttattctggcaggaatattactgcagcgaccgctttcccgtcatattaatgcctccatgcgggaatcatcgcagcgtcagggattacttgtggaggctctggacggaatagaaaccctgaagctgaataatgctgttaactgggttcagcgacgctgggatggatatactgcaagtgtcgcccgttcgtccattcgggtaaaaaataccagtaatgtcataatcagcttttccacagcaattcagcaaattaatactgttctgctggtcattctgggaacgtaccttattcacagtgatgacccacataaccgtatcaccatgggggcactgattgcagccgttattctttccggccgcgcgcttgcaccgcttggccagatagcatcactggccacccgtttccagcaggcccgtctggctatgcagggggtgaatgaaatagttcgccgcccggtggaacgggaaagtcagacacattatctgaccgtgaaggatatccagggggaattccatttcagcgcagtcacgtttttctataagcctgaattacctgcagccttgaaaggtatgtctgtctgtatccggcccggagaaaaggtgggcattattggcactatcggatgtggtaaatcgacgctactgaaaatgatggtagggctataccgtcaaaataaaggacaaattacccttgacggggttgctatgcagcaactggatccctgttttgttcgggataaggttttcctgcttgagcagaatccccggctttttctgggaactctgcgtgaaaatctgcagctttcgcgtcttccgggaagcctgtcggatgtggatatgattaatgcagccggacgtttcgggtttgaccgttttattcgtcatcacccatgcgggcttgatatgcagataggggaaggaggtcaggggctgtcaggaggacagcgtcagatggtcgctctgacgagaatggtactgggttctccccgggtagttctgcttgatgaacccacgacgggtcttgatctgcagacagagaacattgttctgaaagggctgaatcactggagccgtggacgcacaatggtggtggtgacgcatcgtctgcaggtgctgaatattgttgaccgtattatcgtgatgaatgaaggccgggtaatgatggatggtccccgcgatgaaatactgaaaaaactgtcagggaaacagcagagtggggagagcagagcgataacttcatgagcgtcaagcggataagaaataaagagcatatatgtttaacagtttgtggaccgcaggggtatgacagaaaaaacggaacggaataaagcgtcgtcagaggtggttaggcagtcagacctggccctgttgacagatgtacaggcagcccttcagcaggaaaagcatcatgcccttttcctgatggtgatttttctgctggtactggtagtgacgtttgttatctgggcatggaacagtcctctggatgaagtgacccgtggtcaggggagtattattcccggcagcagggagcaggttatacagacccttgacccgggtattttgaaaacacttgaggtcagggaaggagatattgttgagaaaggtcaggtactgctgacactggatgatacccgaagctctgccatgctgagggaaagtgaagcccgggtgaataacctggaagcagtcagggcaagactccgtgcagaagcttattccgaatcactgacatttccggatgacgtgcctgcagatttgagggagagggaaagtactgtttatcgactacgaaagactgaactggcacaaagcatcgccggccttaagcagagtaaggctctgctggataaggaaatagcaatgacccggccaattgtgcgtgaaggggcgatgtcggaagtcgaactgttacgtatgcagcgtcagtcagcggagctgcagttacagatggatgagaaacagaataaatacctgacggaagctggagctgaactagtgaagacagaagcagagcttgcacaggcaaaagagaatatggctggcagagccgacccggttgagcgttcacgtatcagggctcccctgagaggcatcgtaaaaaatattcgggtaaatactttgggaggcgtggtttctgcaggacaggacataatggaaattattccgctggaagaccagttgctgattgaggcttatataaatccacgggatgttgcctatgtcagaacagggatgccggcacttgtaaaactgacggcttatgactatgccatttatggtggtcttgacggagtggtgacactggtaagtccggatactttacgtgaccagaaacggccgggagatttaaaactggatccaaatgaagcatattatcgagtactggttactaccagtaataattatctgacagacaggaacggaaaaatattgccagttattcctggcatgatagccagcgtggatataaaaacaggtcagaaaagtgtatttcagtacctgattaaaccaatcaccagaatgaaacaagctcttcaggaacgatgatttattatattattaatatcatggctccgtaatacagacactcaacaggaagtctgtatcgtatcgcaatgaaaaaataattttattaaatttaaggagaataagtcacgtatagaaattattatttttccacctctggaaatgattaatttattttatattgataatcgcaggttttaattagcctaaggattttatatgaaaatgatttttaccggtaaggtcagcggagaaaaaaccgtgctgactgtcggaggtcgtcatacagttaaagcacagcccggggagcagtatggactgatcgatgaggtgaccggcctagtgcctgacggtgttgaggcggatcgctccggtgatgatttaattctgcgtaaaaaggaagaagatactgaggtccggatagagggattctgggaagaatgccagcccggggaaacacagtgtacggcggtatttaatattgttggggaagatggacaggtcaccgaagccgtactgactcaggatggcccggtgctggatgatattactgccggacaatcgggaaccttgtcagatgatgatcgtggcggttttatatggttgggcggtctggcatttggtgggggactggctgctatggctttagctgcaggtggcggtggaagcaaacatagacatgaaaatgatgactctgatactacagccccatcgtcaccagcactgaaggcagaggatgacggttctgtttctgttgagctgccgggtgatgccaataaaggcgataccgtggatgtcacctttgaagatgaaaaaggtggtaagcacaccgtgacgctggagaaaggggataacggctggacatccagtgatccgacgctgatcccggacagcactggcgataaagcgaccattccggcagataacgtgaaggataacagtgaagttaccggggttgccaaagatccgagcggtaatgaaagtgacccgtcaaccgtaacctcaaaaactgatgtgttaccaacagtgagtattagcgttgagacaacatcaacagatgtcaatggtgatggttttactggtatagctagtgtcaatgggaccgtaatggatgttcccgcaactattgaagataaggatgattccactggactggtttatacggtttctctgaatcatgtcactacaacagatgtaacagttacagttacattgggtagcggagctgggcattctgatgctgctgactattctgatattggtggagcacagcataacgggaaaattggccttcatggtgatactggaaaagtaacctatgatggtgcaacaaccgtaacaattgttattcctgccggttcaaaaagtgtttcatttatagttgatccaacgcttgaggctaaccaagatgcctttaatgccgagggtatggaaaaagttgttgcgaccattacgggaacatctgataacgttacggcagctactgacatcgttgataatgcgggagcatccgcaacaggtgttatttatgatggtaatgccatttcattacgtaatctggacggtgattttacactgaaatattcactatcatcttctatcgccgaaaaaggggactttgggtataccattggcgcgaatagtggtgaaaatgatccaatggtaacaacagattacaatgatacggtttatgttggttattaccagagtggtaaagaaacaacatcgtatagtaatgttgctaactcacaggataatgggccagacggaacaaaaaccgatggcaatcaaagcattacgactgttgatttaggtgctggtgatgatctaatggtcattcgtggtaacatgctggctaatacaagagtatatactggtgagggtaacgatacttttactatggatggtatgaatactgcattacgtgttatgtatgcgggtagttatatctttactgagtctggcgatgatattgttacgatcaaacgtactggtgtaacaaatgccggacagatttatcttggttcaggtagtgatacatttatccagggggatgctactgacaataacgatacaacattatctggtttattggatcttggtagtggtacaaaagatatatctaatatgcctaaggaatatctttctgtttatcaggatggcagtaatttaagcttgggtaacgacaacaatattgacactgccacagatgttaataccgtcactatttatggctctgtgtctggtgaaattttaggcggatacggcagtgataatattacggtaactaaaaatctgaccggtaatatttctgtcggtgacaatgcggataccttaacggccggatggatttatggtggcagtactgtctctatgggggacggcaatgatactgttaccatcacagatggtgcatataacacgactatttcactgggggcgggagatgatgtatttgatgcaacttctggtgtaatgggggattctgcttatgccactgtcgttaatggtgaagacggcaatgatacctttaaattaggcacaattgccaaaaacctgaccattgatgccggtgccggtgatgatattgttgttctgacaaaagactatgactccacctcctccggtaatcagggctatattaacggcggggaaggcagtgataccctggttctgacaggtaccatttctgtcaatctagcggccggtaaaaatgaaggtattgccggcttcgagaaagtggatatgactgttggtagcgatctgaaagctgacaatgcagctcagttagtcaagttaacggcatcggatgtattgggtataaatgacaattcaacgatttatatttccggtgatgccaatgacaaagttgatttgggggctgacggagcgggaagtctgggtacatttacggcaacggcaacaactgttaaagcaactgcgttagatggtattgagcatacttatacgttatacagcagtgtaagtggcgcaaatgtgtatattgataacaatattattgatgcgaatggtgtaatttaatagttgtcttattcatgtgggagggaaacttcccacatttttgagtgttatagaaacaacttaataatttgcaaatgagtcaatatgacatttatatacttcttgtagaaggcataatgtatgaatataatgattgttacgcacaataaatatcttgagttaggtttgaaaaaattattgagcaggcattctattactattggtgctgatttttttataccagataatcgtgagcatataataaacaataatatttttgtcattctctgtgataaaaaaaacagtatgttaatgaattatatttttaacggttatagattttacttattaccagtagaatcaataagtagcctgtcatcgatttatgaatgtatgtttagtggcaggttgttgtttgggaactctccacataaattaaccatgaatgagatgattatactattctattatgttttccatgggtggaatgtagcaagtattgcttatcagtttggtatgagttcaaagactgtgtatactcatatatataaagcaaagaaaaaaaatggaatatcaggaaaaaatctcaaatataaatgtgcttatgaaaggcttgtctgttaattgaagtgttggtcgctttatatgaaagttatatgtgataatcgttatttccttattgggatcaacaaaacaattgaagatgtcatccagaaaaataaaattaatggcgtaaaaaatattattataatatcatcccctaaaacgtcagatgttttttgttttttacagttcaataacattgattttaggtgttcggataccattttttatgctccccctgaaacctttgattttctcagggatattatccacgcccctatttgcaatataaaggatttaactaaaaacaatccacttaataacacacattatatttatagagtaaagaactctcattataagctttctttatctggaaggcagaaggaggtcctgctgatgtttttatatggtttaagtggaaaagatattgctaataacctcggcgtttcaataaaaactgtttcgagttataaaaagtctttaatgaatagactgtatgtcagtaatgatatacagttattttacaaaggtctattattatgtagataagtgctaattgaacgcgtttgatattaacgacttcagcccagtctgttaccagttgagcatggtgataacgtgcaccatccagaatgatgttgactgtttgattataatcaggataaacctttcttatctcattgaaaaaccgggatatgcttaacgcattaatggttgggtactcactgatgagtgggcgttccggagacttcagatttagcgcacccatgatattcagccgtgtacggctacctgttgtttctattgctttccggtgcccttttcgtatccagccataactgattttggtggcctgagtggggtggacagcatctataaaaagaacaggttcatcgcctgctttttctttcaggtcttcataaattcaatgaattgcgcctgcctctcttcgctgaatttatgaggcgttccagccggttttttgtaagagaagccgttacgatgcaaccatttgttcataccggcaacgctgaacaaaattccccatgtgtggagaacaaaggcgataatttcatgagtatggtgaaacaaattatcagataaatgtttgattaagagtgatgtttgttcagcactgagtttactgtctgaaccaccgttttcgggctttaacttccctttattcataaactcatggatatgatgatcaacggtggtctgatgcaggcgcagagcctgagcaatcatgactgaactccagccttcagaagccagaagaatggctttaatacgatcgcagacccgcttgttacgactggtatcgtgaaggcgttccagctctgctttttgtagatcggagatgaagattttcatgttgcgtagcatgatcctctgtcatgacaaaatcaagcatcttcaatgatcacgggtatagcatcattattctataacatgaataaacggattgaatgtattatgttaaaaatgagtttatacgtaataatattgttattttcctttcagattagtgcagccattactagcaaggaaagtgaggctgtttcaccattattaatggatgttaattcttcactaacaatggaaatatttctgaatattccacatcatcggaaccatcgcaacagggcgtatttcctgtaatatgtactcgacttcatcctagatccgtaatgaaacgccagttattaacctgctaggggcctgtttttataattggtgatgatcctttttctctgcgctggatgagtgaacatctggagatccttaaatcgctaaatacccttggtttggttgttaatgttgaatcagtagaacgaatggaggtattacagaagcgggctgatgggttattgttattgccagttatctgcgataatttcgtgcaaatgctgcaattaaatgcttatccggtattgatcacagagatggaaatatcacaatgattaataacataattactgctaataatatcgtaattttgaaagtggtaatcctgttcacggcactataattagagttatgtcttgtatccgttcagtataatttcacgaatgctttattaaccggatgcgtgaatgtcattcttcagatgacaaagacgtcatcgcgattgatggaaaagcacttccacactcctatgataaaagccgtcgcaggagagcgggctttcgtagtcttaccccgactctccccggccctaaacgcaacacccactcacagcaacctaaactcatccgcatcccgccatgccggaaacttttctctatattcccttaatacagccatcgacaactccgcatcaatgcgcgttgcctgatgcgcgtcggcagtagcgataatctcgccctgtggattaatcacccggctgtcaccgcgataatggcagccgttgccatcgctgccgacgcgattgcatcccgctacatacgtctgattctcaatcgcgcgggccgtcagcaatgcctgccagtgcagagagcgcggagcaggccagttggcgacgtacagggcgaggtcataatcgttgagattgcgcgaccacactggaaaacgtaagtcgtagcacaccagcggcaaaatacgccagccgcgccattccacaatcactcgcgcattgcccgctttataatgtagatgctcatctgccatgcggaacagatgacgcttatcataaaaatgtaccgtgccgcccggctcaaccagcaaaaagcggttaaccgaaccagactccgtttgtaatgcaacactgcctgcaatcagcgcattgtactgctgcgctttggctgtcatccagttcactacgtcatcttgtgctagcgacgaagctgccgcttccatggcaaagccgctggtaaacatttccggtagaacgatcacatcgcgcccggtaataccttccagttgacgatcaaaatggcgcagattggcagggccatccatccacaccagtggttgctgcaaaagcgtaatcttcaaaccaggcacggtgtacaactcctttatgcgaagggttttataactttaacaccttatcaggcagttgccttagcgcagaataaattgataacaaattctgatattggaaatatctgatttgcaaattatcgtgttatcgccaagctttaggaggttaataacatgggcaggataagcccgggaggaatgatgtttaaggcaataacgacagtcgccgctctggtcatcgccaccagtgcaatggcgcaggatgatttaaccattagcagccttgcaaagggcgaaaccaccaaagctgcttttaatcagatggtgcaagggcataagctgcctgcctgggtgatgaaaggcggtacgtatactcccgcacaaaccgtaacgttgggagatgagacgtatcaggtgatgagcgcgtgcaaaccgcatgactgtggctcgcaacgtatcgctgtgatgtggtccgagaaatctaatcagatgacggggctgttctcgaccattgatgagaaaacgtcgcaagagaaactcacctggttgaatgtgaacgatgcgctttctattgatggtaaaacggtgctgttcgcggcgttgaccggcagcctggaaaaccatccggatggctttaattttaaataattagcggataaagaaacggagcctttcggctccgttattcaattacgcggcttcaactttccgcactttctccggcagctttaccggcttcgtcgccagctcttctggatcaaagtcatcaacgttaatactacgcagacggctttcttcagctttcaccagaatagcggcttcatctttatcaatcagccccttcgccagtgcgttgtgcgccagttcatccagacgggtaaacggcaggtttttacccaactctttacagatccgctgatgaatcgggtcggcggcaatcacatccaccagcgcctcttccagtaaaccaaccgggttatgcttgctcagtgtcaggtactgaccgcgaccaatacgtgaacgggtggcattcggcacttgtaaaatcttcgccactttatgatccagcttgtcagacggtgccaggtaatgacgtccggtcgggaagatcaccacattcagcagcccggcaaccacgcggttcgggaagttttgcagtaaatcgtccatcgcctgttctgcctgatacagcgcatcctgtacaccccagtgcaccagcggcaggtcggcttcattacggccttcgtcgtcataacgcttcagaacggcagaggcgaggtaaagctgacttaaaatatcccccagacgtgccgagatacgctcacgacgtttcaggctgccgcccagcaccaccatcgagacatcagaaagcagggcgaggttggcgctcaggcggttcaggtgctgatagtagcgtttagtggcatcgccggttggtgtgctgctggttaaaccgcgcgtcaggcccagccagaagctgcgaactttgttgctaccgacgtgaccgatatgtttaaacaggagttgatcgaacgcgttaacgtcattgttcttcgccgcttccatctcttccagcacgtacggatggcaacgaatcgctccttgtccgaagatcatcatgctgcgggtcagaatgttggccccttcaacggtgatggcaatcggtgcgccctggtaagcacgggccaggaagttgctttgcccgagcataatgcctttaccaccagtgatatccatcgcatcaataatcgactgctgcccgcggtgggtacagtgatacttaacgatagccgacagcacggcaggtttttcaccgagcataatgccgtaggtaatcagcgatgccgcagcatccattacataagcgtttccggcaatacgcgccagcggctcttcaatcccttccatcttaccgatagagattttgaactgccgacgaatgtgcgcatacgcgcccgttgccagcgctaccgatttcacgccgccggttgagttggaaggcagggtgatgccgcggcctaccgagaggcactccaccagcatccgccagccttgcccggccattttcggcccgccgatgatgtaatcgatcggcacgaacacatctttaccgcgcgtcggtccgttctggaacggtacgttcagcgggaagtggcgacgaccaatttccacacccggcgtggtggtcgggatcagcgcacaggtaatacctaaatcttctgcaccaccgagtaatttctccgggtcggagagtttaaacgccagaccaagcacggtcgcaatcggtgccagcgtaatgtagcgtttgttccaggtcagacgcatccccagcacctgctggccctgccattcgcccatgcagacaatcccggtatccggaatcgcgcccgcatcggaacccgcttcggggctggtcagtgcaaagcaagggatctcctgaccacgcgccagacgcggcagatagtgatttttctgctcgtcagtgccgtaatgttgcagcagctcgcccgggcctaatgagttcggcacgccgacggtaatcgccaggatcccgctcacgccggagagtttttgcagcacgcgagactgggcataagccgagaactccagcccgccgtactcttttttgatgatcatcgcgaagaaacgatgctctttaaggtacgcccacaactccggcggcaggtccgccagctcatgagtaatctggaaatcattcgccatccggcaggcttcttctaccggaccgtcgagaaacgcttgctcttcagtggtcaggcgcggctgcggatagttatgcagctttttccagtccggcttgccctggaacaagtcgccctcccaccaggtggtgcccgcgtcgatcgcttctttctcggtgcgcgacatcggcggcatcactttgcggaatccacgaaacactggcgcagaaatcatcgatttacgcataggggcaaagttaaacggtatgaggataatggccagaggcactagtacccacgccgaccacagaccagcaacgccgaggacggctgtccaggcgagcaaaatcagactgctgataaataagctcacgcggtgatagaacaatgcgccgagcaggacaaccgtagcgagaatactcaaaatcatcataacgaaaagccccttacttgtaggaggtctgaccacttgtgatgatatggttgtagtggatgtaaaaacatttagcaatgtgtttacaatataattacaacaaagctcacattgttgctgtttttatccgcacttcaggtcaaaaagtcctggtcatagcacctgcccgtacttctcgcttttggcggtatccggtacactgcattttgtctattacatttatgctgaaggatatcctcatgtaccaggatcttattcgtaatgaactgaacgaagcggcggaaacgctggctaactttttaaaagatgacgccaatattcacgccattcagcgcgcggcggtcctgttagcagacagctttaaagccggtggtaaagtgctttcctgtggcaacggcggctcccattgcgacgccatgcactttgccgaagagttgaccggtcgctaccgtgaaaaccgtccgggctacccggcgattgccatttctgacgttagtcatatttcctgcgtcggtaacgattttggtttcaatgatattttctcgcgttacgttgaagcggtaggtcgcgaaggcgatgtactgctggggatctccacctccggtaactctgcaaacgtgatcaaagcgatcgcagcggcgcgtgagaaggggatgaaagtgatcaccctgacgggtaaagacggcggcaaaatggctggcacggcggatattgaaattcgcgttccgcactttggttatgccgaccgcattcaggagatccacattaaagtgatccatatcctgatccagttaattgaaaaagagatggttaagtaagtctggcgtaggccagataaggcgtttacgccgcatccggcatttgtgctctgatgcctgatgcgacgctgacgcgtcttatcatgcctacaatctgcacccgaaccgtaggccgaataatgcgttcacgccacatccgacctgaaaattcttaaatcaatcttcgccgggggccatgcgctcccgctgttgtggaggttacccatgtgcgaattgctcgggatgagcgccaacgtccctaccgatatctgctttagtttcaccggacttgtacagcgtggtggtggaaccgggccacataaagatggctggggcattaccttttacgaaggtaaaggctgtcgcacatttaaagatccgcaacccagctttaattcccccatcgccaaacttgtccaggactacccgataaaatcctgttcggtggtggctcatattcgccaggctaatcggggcgaggtggcgctggaaaatactcacccgtttacccgcgagttatgggggcgtaactggacttatgcccataatggacaactgacgggctacaaatcactggaaaccggcaacttccgcccggtcggtgaaaccgatagcgaaaaagccttttgctggctcctgcataaattaacgcagcgttacccgcgcacaccgggcaacatggcggcagtgtttaaatatatcgcctcactggcggatgaactgcggcagaagggcgttttcaacatgctgctttctgacgggcgctatgtaatggcgtattgctcgactaatttacactggatcacccgccgcgcgccgtttggcgtggcaacgttgctggatcaggatgtggaaatcgacttcagctcgcagaccacaccgaatgatgtggtcacggtgattgcgacacagccgctgacgggcaatgaaacctggcaaaagattatgccaggtgaatggcgcttatttttcctcggggagcgtgtagtttgatgccagttgtggctgcacaacttcgtggcttaacggcttgctgaccacgtaacggccattgaccacagaaacggtcggtggcttacgggtttgctcaaagtagtcgtagcccggcttcagttgctcccagaagtccttaaagttggaatatttatggcgcttcatattggcgtcggtcatacggaacgggtaaatactcacttgcacgctcggctgaccaaacaccagcgcaccagtaacgaactggaagatctcatcaataccctgattggtcatcgcgtagcagccgatggaaacacaatcgccgtgaatcatcaggtatttcccttcataaccatgcgcacggtcataggcgtttgggaatccaatattaatcgctttgtagtaacggctgtctggttttaactgattacgctggacgctataaaacccttccgggcttttgaaatcgccctgacgctgttttggccctaatccgccggaatatttacagattttatagctgtcgagcagttgatattgctcgcccattttgacgtagagatcgagcgtacgttcttccttgaagatctggatgtagacaggggatcccatcaactgctgcttatactctttgctcactggcgtggtcgagctactgctgcccagcaaaccggcaaacgaaacgcacgggatcaacaacatcgcaagaattaatgcgattttacgcatactgcttattccttgataaaacggttacacacgccaggacggcaaaatgaatcccaaatcggaatagtctggatttggaaggctcacattatcaccaaaagagttttacgcaagcctgtcggcgcagggtttacaaatttagcacaggggcagttttcaagagtccgaaaagcgcatggattgtagatttatttcttatttcctaagattatgaaaccgcaatagtaatatgcaaataagcaattaataatcccgtttactcctccggtcttttaaaattctcaccttcattcagctggtttatgtccttcatgtcttcgttcttgcacggcagatttctgcatccaggcgtgttttcgttatgcgttttgctccctttactcgccagcgccaccacatcacatatctcttttagctacgccgcccgccagcggatgcaaaaccgtgcgcgtttattaaaacagtaccaaacccatctgaaaaagcaggccagctatattgtggaaggcaatgccaaaagcagaagggcgctgcgccagcataatcgggagcagataaaacagcatccagaatggtttcctgcgccgctcaaggcgagtgacagacgctggcaggcgttggtggagaataatcatttcttaagcagcgaccatctacataacatcaccgaagtggcgattcaccgcctggagcagcagctaggtaagccttatatctgggggggcacgcggcctgataaaggcttcgactgtagcgggttggttttttatgcctacaacaagatccttgaggctaagctcccgcgcacggccaatgagatgtaccactaccgtcgggcaacgattgtggcgaataacgacctgcgccggggagatttgctgtttttccatatccacagtcgtgagatagccgaccatatgggcgtatatcttggagacggtcagtttatcgagtcaccgcgcaccggggaaaccattcgggtaagtcggttagccgaacctttctggcaggaccattttttaggcgcgcgacggattttgacggaagagacgattttgtaggccggataaggcgttcacgccgcatctggcggttgtgcgccggtgtctgatgcgacactacgcgtcttatcatgccgacaaaaccgcactcaccagtaggccggataaggcgttcacgccgcatccggcggttgtgcgccgatgccagatgcgacgccacgcgtcttatcatgccgacaaaaccgtgctcacccgtaggccggataaggcgttcacgccgcatccggcggttgtgtaccggtgccagatgcgacgcagacgcgtcttatcatgcctatatcagcgcccccattatcttcaactccagctcatccggcacttcgttatacgacagcacatgcagccccggcgcaaacaaccttgcgtagcgcgccagcaaggggcgcagctgcggcggcaccagcagcaccggatctttccccgccgctttcatctgctccttcacctgaggcatcgtgctctggaactggttgagcatattcggatccactggcacgctatcaagcatcactttgccggcctgttgcgcctgattcaccacgttggtcagcagattttccagctcattattcagcgtatacaccgtcagctcctgcttgcgaacgaacggatgggtaatgctgcgccgcagcgccaggcgcacatcggccgccagcagaatatgatctttagtcaccgcactactggcgaccaacacggtggcgatggtgacgatatcgcgcagggaaacgccttcagtcagtagcgcccggtacactttcagcaactggctgtaattgagcgccgcgctcaaatcttccgccagtcgcggtgccatcgacgacaaacggttatgcagctgagtaatatcgtcatagttaaacaaatcaggaatatagctgcgcacaatcttattcacatgggtggcaattacgctggcgctgtcgatcacctgataccccatattcagcgccttcgctttctgcgcgggctgaatccaggtgaccggcatcccgtacgccgggtcgttccccagcacgccgtctatctcgccgtaggtttcgctggagggcagggccatcagtttatctgccggaatatccgcttcatcagccttaatgccgttgatgaaaatggcgtactggctgggcttgaggcggaagttttcccgaatacggatctccggcagcagcacgccgttgccgtcggaaatcacctgacgtacgccgcgaatacgctgggtgagcgggttgccctgcgctttatccaccagcgccaccagtttgtagccgaggcttaaactgataggttcgatcagcggaatagtttcccaactgacctgttgctcgctggtttctgtcatcgtacgggttagcgtttcgaggcttttctcttccgcctccgccgcttgcgggcgcttgctcatccgccagccggtaaaaccaagcagggcgctgaacatcaggaacgggaaatgcggcattcccggcaccaccgccagcacgaacataattccagtggcggtgtagagaaccgacgggcttgccagcaactgattacgcacgtcatgggcgatatcaccgttatcgctgacgcgggtgacgataatcgccgccgcggtggagagcagcagggaagggatttgcgccaccagcccatcgccgatagtcatcagcacatattgctggaaggcggcgtcggcgctcaggttgtatttgaagatgccgatacagacgccgccgatcaggttgattgccagaatcatcatcccggcgatggcgtccccgcgcacaaattttgatgccccgtccattgcgccgtagaaatcggcctcgctggcgacatctttacgccgggtttgcgcctgcgtctggttgatcaacccggcgttaagatcggcgtcaatcgccatctgtttgccgggcatcgcgtccagggtaaagcgggcagaaacctcggaaatacgctcggcccccttggtgacgacgataaagttgattgtcaacagcgtcagtaaatccgagcgtgaaagcattatcgccgcgctgcacgggcagtcgattttcaatggtggcgggctgtcgccgttaaataaaatcagcccgtctcatccgccaaaacctgccaccgtggcggtgccggaagagacggagaaaaaagcgcgcgacgtcaacgagaaaacggcgctgctgaagaagaaatccgccaccgagcttggcgagctggcaaccagtatcaataccatcgcccgtgatgcgcatatggaagcgaatctggagatggagattgttccccagggattacgcgtgctgattaaagacgaccagaaccgcaatatgtttgaacgcggcagcgcgaagattatgccgttctttaaaacgctgctggtggagcttgcgccggtgttcgactctctcgataacaaaattattattaccgggcataccgatgcgatggcctacaaaaacaatatctacaacaactggaacctttcgggcgatcgcgcgctttcggctcgtcgggtgctggaagaggccggaatgccggaagataaagtgatgcaggtaagcgcaatggcggaccagatgttgctggatgccaaaaatccgcaaagcgcgggcaaccggcgcattgagattatggtgctgaccaaaagtgcgtccgatacgctgtatcaatactttggtcagcatggggataaagtggtgcagccgctggtgcaaaagctggataagcagcaggtgctttcgcagcgagcgcgttaaatgctgaatctttacgcatttctcaacccctgaaattactgtatactttaccagtgttgagaggtgagcaatgcgtaaaatcattcatgtggatatggactgctttttcgcagcggtggagatgcgcgataatcccgccctgcgcgatatccctattgctattggcggcagccgcgaacgacggggggtgatcagcaccgccaattatcccgcgcgtaaatttggcgtacgtagcgctatgccgacagggatggcgctcaaattatgcccgcatctcaccttgcttccagggcgctttgacgcctacaaagaagcctcaaatcatatccgcgaaattttctcgcgctatacctcgcgcattgaaccgttatcactggatgaagcctatctcgatgtcaccgatagcgtccattgccacggttctgcgaccctcatcgcccaggaaatccgccagacgatcttcaacgagctgcaactgacggcgtctgcgggcgttgcgccggtcaagtttctcgccaaaattgcttccgacatgaataaacccaacggtcagtttgtgattacgccggcagaagttccggcatttctgcaaaccttaccgctggcaaaaattcccggcgtcggcaaagtctcggcggcaaaactggaagcgatggggctgcggacctgcggtgatgtgcaaaagtgtgatctggtgattctgcttaaacgctttggcaaatttggccgcattttgtgggagcgtagtcaggggattgacgagcgcgacgttaacagtgaacggttgcgaaaatccgtcggcgtggaacgcacgatggcggaagatattcatcactggtctgaatgtgaagcgattattgagcggctgtatcctgaacttgaacgccgtctggcaaaggtaaaacctgatttactgattgctcgccagggggtgaaattaaagttcgacgattttcagcaaactactcaggagcacgtctggccgcggctgaataaagctgatctaatcgccaccgcgcgtaaaacctgggatgaacgtcgcggcgggcgcggtgtgcgactggtggggctgcatgtgacgttgcttgaccctcaaatggaaagacaactggtgctgggattatgaataacatacaaataagaaactatcagcctggtgattttcagcaactatgcgctattttccttcgagctgttacgatgacggcgagtcagcactattctccacagcaaattgccgcctgggcgcagattgacgaatctcgctggaaggagaaactcgcgaaatcacaagtgcgggttgcagttattaatgcacaaccggttggttttattacccgcattggacattatatcgatatgttatttgttgaaccggaatacacccgacgcggagttgccagcgctttgttaaaaccattgattaagtctgaatccgaacttacggtggacgccagcataaccgcaaaacccttttttgaacgttatggttttcagacagttaagcagcagcgcgttgaatgccggggaacgtggtttactaatttttatatgcgatataaaccgcaacattaaatccagcttgcaatgaaaataacgcccgtctagtatgtgcgcgttttcttattccacaaactgcaaggaggtaaatcatgacaaatcctttatcaatgactctttgcagacctttccaggattaattcttttttcttgccctggattcgtctgccatttcctgatttttattcataaatggaatggtacatgggcaaatatattcgtcccttatccgatgcggtatttaccatcgcatctgatgacctgtggatcgagagtttagcgatccaacaattacacaccacggcaaatttacccaacatgcagcgcgttgtggggatgccagatttacatcccggacgcggctacccgattggcgcagcgttcttctctgttggtcgtttttacccggcactggtcggcaatgatatcggctgcggcatggcgctatggcaaacagatattctcgctcgcaaatacaacgccgataagtttgaaaagcgattatcagatctggatgacgttgctgaagaaagctggctggaggaaaacctgccgtcagcatttgcacagcatccgtggcgcaactcgcttggctccatcggtggcggtaaccacttcgtagaactgcaacagattgatcaaattatcgacgcggaactgtttgcactggctggtctggatgcgcagcatctgcaactgctggttcatagcggctcgaggggattggggcagtctattttacagcggcatattgcctcgttttcgcatcatggtttgcctgaaggcagtgacgacgcgctacggtatattgcggaacatgacgatgcgctggcgtttgcgcgtattaatcgccagctgatcgctttgcgcataatgcaacaagttaaggccaccggaagtccggttctggatgtggcgcataactttgttagcgcgtgccaaatcggcgatcaacagggctggttgcatcgtaaaggcgccacgccggatgacaacggtctggtgattattcccggttcacgcggcgattactcctggctggttaaacctgttgcgaacgaaaaaacgctccactcgctggcgcatggggcggggcgtaaatgggggcgcaccgagtgtaaagggcgtctggcagcgaaatacacggcgacgcaactctcgcggactgaacttggcagtcgggtaatttgtcgcgataaacaactcatctttgaagaagcgccacaagcctataaatcggctgaaagcgtggtgcaatgtctggtgctggctgggttaattattcctgtcgcgcgactgcgcccggtgctgacgctcaaaaacagtggagggaaaaaaggatgatcttgctacaactctcctctgctcaggggccggaagaatgttgtctcgcagtgagaaaagcactggacaggctgattaaagaagctacccgacaggacgtcgcggtaacggtgctggaaacagaaacgggtcgctactctgacacactgcgttcggcgctgatttctctggatggcgataacgcatgggctctaagcgaaagctggtgcggcactattcagtggatttgtccgagtccgtatcggcctcatcatgggcgcaaaaactggtttctgggcattgggcgttttaccgctgatgagcaggaacaatcggatgcaatccgttatgagacgctgcgttcgtcggggccgggcggtcaacatgtcaataaaaccgactcggcggtacgcgccacgcatctggcatccggtattagcgtgaaggttcagtcagagcgcagtcagcatgctaacaaacggctggcgcgattactgattgcctggaagctggaacaacagcaacaggaaaatagcgcggcgctgaaatcgcagcggcgaatgttccatcaccagattgaacgtggcaacccgcgacgaacgtttacagggatggcctttatcgaagggtaatgaaggatgaaactgccggaaggcgattaaacgccatccggcagcaaatcaaataattacttcgccggaatttctttcagcagttcagtcagcagtgtccagtaatggccaacgctttcgatatgaacttgctcatccggagagtgtggaccggtgatggttggcccgatagacaccatgtccatttccggatacggttttttgaacagaccacattccaggcccgcgtggataatctggatgttcggcgtcttgttgaacagacgctgataggtttcacgtaccagatgcattaccggagagttagcgtccggctgccagccaggatatgcgccttttgcttctgttttcgcacctgccagtttacccagtgaatccagcatgctcactacgtagtctttaccgctgtcgatcagagaacggatcaggcagtgaatttctacgttattgtcggtcatggtcaccacaccgacgttcagggaggtttcgaccacaccttttgccacgtcggagttgcggatcacaccgttcggggttgcgttcagcagacgaataaaggtatcgcgagatgtcgccgttaatgcagctttgtcgttcgctacggagtccagcagcaatgccagattcttctctttttctgccagttcgtttttcaggatctcctgataggtatccaccagagatttcagggcgtcgactttatcagctgcgacagcaatggtcgcaaaggcttcacgcgggatggcgttacgcagtgtgccgccgttgaaatcaataaggcgcaggtccagttcttctgcatgacccgccaggaagcgcaccagcagtttgttggcattacccaggccaacgtggatttcaccgccggagtgaccgcctttcagaccttttaaggttaacttgaaggtttcaaaaccagctggaaccgcttcacgatctaaatgcaggttggaggtgaagtcgatacctcccgcacaacccatgtagatttcaccttcttcttcggagtcggtgttaatcagaatatcagcctgcaaccagttgctctgtaagccaaaagcaccgtccataccggcttcttcggtcatggtcagcagcacttccagcgggccgtgaaccacgttttcgtcagccagaaccgccagtgcagaggccataccaatgccgttatccgcacccagcgtggtgccgcgtgctttaacccattcgccatcaatataaggctggataggatctttagtgaagtcatgcacggtgtcgttgtttttttgcggcaccatatcgaggtgggcctgcaagacgaccggtttacgattttccatacctgcggtagcaggtttacgaatcaggatattacctacctgatcgcgttcgacatggaaacctttctcttttgcccaaccaacaatgtattcagcgagttgctcttcatgataggacgggtgaggaatagaacagattttggcaaaaatatcccacagcggctgtggagataattgagacagttcagacacgttaagtctccttgtcgatcacccgcaaaacagtattgcaggtcacagggttagcagaaaatgttgtcaacacaagacaggcttgcgagatatgtttgagaataccactttatcccgcgtcagggagaggcagtgcgtaaaaagacgcggactcatgtgaaatactggtttttagtgcgccagatctctataatctcgcgcaacctattttcccctcgaacactttttaagccgtagataaacaggctgggacacttcacatgagcgaaaaatacatcgtcacctgggacatgttgcagatccatgcacgtaaactcgcaagccgactgatgccttctgaacaatggaaaggcattattgccgtaagccgtggcggtctggtaccgggtgcgttactggcgcgtgaactgggtattcgtcatgtcgataccgtttgtatttccagctacgatcacgacaaccagcgcgagcttaaagtgctgaaacgcgcagaaggcgatggcgaaggcttcatcgttattgatgacctggtagataccggtggtactgcggttgcgattcgtgaaatgtatccaaaagcgcactttgtcaccatcttcgcaaaaccggctggtcgtccgctggttgatgattatgttgttgatatcccgcaaaatacctggatcgaacagccgtgggatatgggcgtcgtattcgtcccgccaatctccggtcgctaatcttttcaacgcctggcactgccgggcgttgttctttttaacttcaggcgggttacaatagtttccagtaagtattctggaggctgcatccatgacacaggcaaacctgagcgaaaccctgttcaaaccccgctttaaacatcctgaaacctcgacgctagtccgccgctttagtcacggcgcacaaccgcctgtgcagtcggcccttgatggtaaaaccatccctcactggtatcgcatgattaaccgtctgatgtggatctggcgcggcattgacccccgtgaaatcctcgacgtccaggcgcgtattgtgatgagcgatgccgaacgtaccgacgatgatttatacgatacggtgattggctaccgcggcggcaactggatttatgagtgggctacccaggcgatggtgtggcaacaaaaagcctgtgcggaagaagatccgcaactcagcggtcgacactggctgcatgcggctacgttgtacaacattgctgcctatcctcatctgaaaggagatgacctggccgagcaagcgcaggctttgtcaaaccgcgcctatgaagaggccgctcagcgtctgccgggcacgatgcggcagatggagtttaccgtacccggcggtgcgcccatcaccggctttttgcatatgccgaaaggcgatggcccgttcccgacagtattaatgtgtggtggtctggatgcgatgcagacggactattacagcctgtatgaacgttattttgcgccgcgcggcattgctatgctgactattgatatgccgtcggtgggcttttcttcaaaatggaagctcacccaggactccagcctgttgcatcagcacgttttaaaggcgctgcctaacgtaccgtgggtggatcacactcgcgtcgcggcctttggtttccgtttcggcgctaacgttgccgtgcgtctggcataccttgaatcgccgcgtctgaaagtggttgcctgtcttggtccggtagttcataccctgttgagtgattttaagtgccagcaacaggtgccggaaatgtatcttgacgttctggccagtcgtttagggatgcatgatgcttccgatgaagcgttgcgagtggagttgaatcgctattcattaaaagtgcaaggattgctgggacgtcgctgcccaacgccaatgttatcaggctactggaagaacgatccgttcagcccggaagaggactcacgcttaatcacgtcgtcatctgctgacggtaaattattagagatcccatttaacccggtgtatcggaattttgacaaaggccttcaggaaatcacagactggatcgaaaaacggttgtgttaaaaatttgctaaattttaccaatttggtaaaacagttgcatcacaacaggagattgcaatgacgttaccgagtggacacccgaagagcagattgatcaaaaaatttaccgcactaggcccgtatattcgtgaaggtaagtgcgaagataatcgattctttttcgattgtctggctgtatgcgtcaacgtgaaaccggcaccggaagtgcgtgagttctggggctggtggatggaactggaagcgcaggaatcccgttttacctacagttaccagtttggtctgttcgataaagcaggcgactggacgagtgttcggataaaagatgccgaagtggttgaacgattggagcacaccctgcgtgaatttcacgagaagctgcgtgagctgctggcgacgctgaatctgaagctggaaccggcagatgattttcgtgatgaaccggtgaagttaacggcgtgaatgaaatgtgccggatgcatcacatccggcaatatccattaaaactgataggtcatgccaaccgcgacaatatcatcattattaatattcaatttgttatcgctatccagttggttgattttataatcaacaaacgctgacatatttttgttgaaataatacgtagcaccaacatcgacataattgaccagatcttcatcaccgatgccctcaatatctttccctttcgataagacataacccagcgatggacgcagaccaaagtcaaactggtattgagcgaccgcttcaaagttctgcgtcttattggcaaagccgccagagattggcgtcattttacgtgtttcagaatagaaagttgccagataaatattattggcatcgtatttcagacctgttgcccatgcttctgcacgcttgcctgtgccacggctttgcaggttctgctcgttggtacgatcagagttggtataggctccactgatggcgaaatcgctgccaccaaagtcatatgtcaatgacgtgccgaagccatcgccgttttgctttttaacgtcgcggttttcgtttttcccttgatattgcagggttaagttcaggccatcgataacgccgaagaagtcggtgttccgatacgtcgccagaccgctggcgcgtttggtcataaagttgtcggtctgcgccgaggagtcgccaccaaattccgggaacatatcggtccaggcttccacgtcatacaacgcgcccaggttacgaccataatcgaaagaacccaaatctttatatttcaacccggcaaaagcgagacgcgttttttgctgtgcagtatcactctccgctttattaccggcaaactcagcttcccaacgaccataaccagtcagttgatcgttaatttgtgtttcgcctttaaaaccaaaacggatataactctggtcgccatctttactgtcattatcactcatataatgcatggctttaactttgccatagacatccagtttattaccgtctttgttatatatttctgcggcctgtacggatacagatgccacaatgcccatcaccactaatgccagagtgctctttttcattttcattcctgattttaattaacgcgcgaatattcagcgggagagtcccgttgaaaacaggaaagtttttaacctgagattgttaaagatatattacagattaataatattcttaaaatgtggtaatttattaaatctgtaataaaagcgtaaacaactgccgctacgcttgctgatcccgcgcaacaaaacgccatgctttgctcgcagatggttggcaaccgacgacagtcctgctaaaacgttcgtttgatatcattttttcctaaaattgaatggcagagaatcatgagtgacagccagacgctggtggtaaaactcggcaccagtgtgctaacaggcggatcgcgccgcctgaaccgtgcccatatcgttgaacttgttcgccagtgcgcgcagttacatgccgccgggcatcggattgttattgtgacgtcgggtgcgattgccgccggacgtgagcacctggggtacccggaattgccagcgactatcgcttcaaaacagctgctggcggcggtagggcagagtcgactgattcaactgtgggaacagctgttttcaatttacggcattcatgtcgggcagatgttgctgacccgtgctgatatggaagatcgtgaacgcttcctgaacgcccgcgataccctgcgtgcgttgctcgataacaatatcgttccggtaattaatgagaacgatgctgtcgctactgcagagattaaggtcggtgataacgataacctttctgcgctggcggcgattctggcgggtgccgataaactgttgctgctgaccgatcaaaaaggtttgtataccgctgacccgcgcagcaatccgcaggcagaactgattaaagatgtgtacggcattgatgacgcactgcgcgcgattgccggtgatagcgtttcaggcctcggaactggcggtatgagcaccaaattgcaggccgctgacgtggcttgccgtgcgggtatcgacaccattattgccgcgggcagcaagccgggcgttattggtgatgtgatggaaggcatttccgtcggtacgctgttccatgcccaggcgactccgcttgaaaaccgtaaacgctggattttcggtgcgccgcctgcgggtgaaatcacggtagatgaaggggcaactgccgccattctggaacgcggcagctccctgttgccgaaaggcattaaaagcgtgactggcaatttctcgcgtggtgaagtcatccgtatttgcaacctcgaaggtcgcgatatcgcccacggcgtcagtcgttacaacagcgatgcattacgccgtattgccggacaccactcgcaagaaattgatgcaatactgggatatgaatacggcccggttgccgttcaccgtgatgacatgattacccgttaaggagctggccgatgctggaacaaatgggcattgccgcgaagcaagcctcgtataaattagcgcaactctccagccgcgaaaaaaatcgtgtgctggaaaaaatcgccgatgaactggaagcacaaagcgaaagtatcctcaacgctaacgcgcaggatgttgcagacgcgcgtgccaatggccttagcgaagcgatgcttgaccgtctggcactgacgcccgcacggctgaaaggcattgccgacgatgtgcgccaggtgtgcaatctcgccgatccggtggggcaggtaatcgatggcggcgtactggacagcggcctgcgtctggagcgccgtcgcgtgccgctgggggtgattggcgtgatttatgaagcgcgcccgaacgtgacggttgatgttgcttccctgtgcctgaaaaccggtaacgcggtgatcctgcgcggcggcaaagaaacctgtcgcactaacgctgcaacggtagcggtgattcaggacgccctgaaatcctgcggcttaccggcgggtgccgtgcaggcaattgataatcctgaccgtgcgctggtcagtgaaatgctgcgtatggataaatacatcgacatgctgatcccgcgcggtggggctggtttgcataaactgtgccgcgagcagtcgacaatcccggtgatcacaggcggtataggcgtatgccatatttacgttgatgaaagcgcagagatcgctgaagtattaaaagtgatcgtcaacgcgaaaactcagcgaccaagcacatgtaatacggtagaaaccttgctggtaaataaaaacatcgccgatagcttcctgcccgcattaagcaagcaaatggcggaaagcggcgtgacgttacacgcagatgctgctgcgctggcgcagttgcagacaggccccgcgaaggtggtggcggttaaagccgaagagtatgacgatgagtttctgtcattagatttgaacgtcaaaatcgttagcgatcttgacgatgccatcgcccatattcgtgaacacggcacgcaacactccgatgcgatcctgacccgcgatatgcgcaacgcccagcgttttgttaacgaagtggattcctccgctgtttacgttaacgcctctacgcgttttaccgacggcggccagtttggactgggggcggaagttgcggtaagcacacaaaaactccacgcgcgcggcccaatggggctggaagcactgaccacttataagtggatcggcattggtgattacaccattcgtgcgtaaataaaaccgggtgatgcaaaagtagccatttgattcacaaggccattgacgcatcgcccggttagttttaaccttgtccaccgtgattcacgttcgtgaacatgtcctttcagggccgatatagctcagttggtagagcagcgcattcgtaatgcgaaggtcgtaggttcgactcctattatcggcaccattctaacgtctccccaagtctactcaagtatttaaaaacctcttataatcagtatattaatgccccttttagtcttttgacgtctatttaagtaccccaaactctacaagcaattgaggggatttgctgttcagtttagtggagatacccccaagtgaaactcaatgcccgtcaaatagacactgccaagccaaaagagaaggcttacaagttggctgatggtggtggtctgtacctcctggtaaaacctggtggaggagaatattggcgtctcaagtatcgtgtagctggtaaagagaagctgttagcactaggtgtgtatcctgaggtcaccttagctgatgctcctgcaaaacttgaagaagctaaaagaggtatctctgggggaatcgatctgatggaagtgaagcgagaggaaaagattgcccgggaaacgcagttaaacaacaccttcaaagatattgcccttgagtggcacagtaacaaattataatcacaataatagtgtatataattatacattgtatgcttggtaatcatataatgataaaagcttccgataatcagtatgagatttgtccttaaactcctggacatgcttttctaaatcttccaatggtatatgtccatttatacaaataaaattctagtgataaataccttcaggtatgattagacaacatctttattcgatgggggttaatctatatttgatatctttcttttaaataacaacgccattaaaaacgctttgtttaatgacgtttttttattgtttcctatataaagcctaaccagcataaacattggtggctcttatgctcattgtaattaaatgagagtgtgattaatgtctttatatattctggtagttattctctccagaagaatacattgtaagaagatgactgttagtatgttttaacatcaattaacattaaggtttgataataattttttgttggcgagttcaaatgttttcatttcatcatctgatagcccgctccagattttctttagcattacattttgagtgtttattagtttttgagcaagtgtaactccgtcaggggttaagcaaatacttttgcttcgacgatcgtttttattattaattcttttggcaatattctttttttctaatttgtctatgatgtgtgtgatgtttgttttggagaattgtaactccttgtaaatatcagaaggggactgacaataatcatcagacatatataatgaaactaacaccataaatgttgaggtgtttattctatactcgctcaattcattttctataatactctggattttgtcatttactctaatatataagtgtattaacagactctcctgagccgggtatgccggatttttgatttttttgtagtttgttatagtttttaataaatctatattattcataattccaccacacggcaaaagaaaactcatgaagattactcaacctgagtgttacatgaagtatcgtgaacgccggaaaatctaagttccagcctgtaccgtaatcagataatcgcagcaaagggacaaagcaatagtccctttgctgcacagcatcagaatgaataacgaatattagcgtttatcgcatcatctgtgttgtatttaccgaatgcagagcgttcaacttccagccccagacgcgtattgtcgccaaaccgggcatttaaccccacaccgtaaagcatacgaccgtcttttctgccattaatctgatgttctcccgctgcatccttcaggtgaacgtcagcactgtccgtcagatcgaactcataatgcaggccggcacgggctgtcagactccagtccttaccactgaaggttttaccggaaacaacgccggttctgcctaccagaggattaacgctgttacgacgcattgagacatccattccactgtcgttccagttaaatgtttggccctgcagtcttccccagaccagttccgcctgaggttcaacaaacgtcgtatctgtcagatgataacggtatccgacttctgcacctgcatacagtgaatggctgcggaagttctgtttaccagctccggcaaagttcaggtcatatttgttttcattgtgaatatatttggcaatcaaatcaaagtaagcgccggaccggaacagaccactggcatagaaaccaccaccccatgattttgttttaccgctgtacaggcctgctgacgcatctgtgtcagtgtaggtggccatcacgccggtaaacaggtccatacttcccagttcgtgcttacggtcagcccccatctgcagcagggtatagtggtcagtgaaaccgccatcagcagagccggaaccgttcagcagacgcacccacgtaccggcttcgccgttaatatccctcaaatcgcccatgcgtttgttcaggttgttaacttcagtgatgaagttgttatagctgatgtgcatgaatgtggcggcagccttaccctggccgtcgttacgtgcaacctggtaaccatcgaggacccactcttttttcccgtcctcttttctgacactaagggtgggggtgacatcactgaatcccacaacccgtgttgatgccctgaacagattatcagctgtcgcttcaggtgcgctgaccagtggaatatcaagcgtgtccttgtcagagggttttttcaggaagttaacccagatgctgttgtcatgacctgttgccgacttgtttatcaccagtttgtctgccttgttaaggtctgtacgcatgacaaatgctgactgaaccgcgtccagattatctgttgtcagtgtcgtgaacgatgatgttcccccgttaaaaccgactattgtccggttaagtttcatatttcctgccgtggagtttccgttcatcgaccactgggtgtctgtcatgctgacggtggcatccggtgcattcaggctcccgctccaggtattgcggtacccgttaaacaggctgtacaacatctgattctgaagagtcaggtcaggactcagttccccttcccctccgagggtgacagtccctttatcctgaacattgatattacctgacaacatactgtacggccccacgttcaggcgggcatcgtctcccttcaggttccatgaaccggcataatcgtatacaggtaaaagtgtgtgagatacctcatcaggacggctgttcagactcagggtggcatcagaaatattcaccggaccgtcagaaacaaaactctgactggccagaacatttgctcccttgttcagattcagggcggtactggtcagcgttgagttctccagaacggcactgtctgaggagatattcacggtactgttgttcgcctgtattccgccattgaatatctcattgatattcagcactgactgattatccaggttgacggtgccgttgaagacgcttttatctgcatctttagttgcaacagatgtgccttcttcaagggtaaatgctgttccctggccatcttttttgtcgataaatacccgactgtcgcccagcgtgacgctggagttatctgcctggatggttgtgttcagtgtggcattgcggcccagaccaaagtctgtatcttttaacacgagcgaaccaaagctgaacgtcctgttctcccagtcatcctgtgtaaatgaggtgggctgtgtcagaacggaattgtcgcccagagacgagactgtatttgcaatactctgagacgttgaagcatggataaccgggtggccctgaatggtcagacgaccgttttcctgagtaaatgtaccggacatattcgctgagccgtccataaccaatgcgccggttgtacccggggttgctttatttgagaaattaatatttcccagcaacttgccatgatacagataccctttattattaattctgtttgcaagcagtgcctgtgcactgttctggtcatgtccgacatattcccagtgctcgttactgacctgaccggtagggaaccagccataactacttgttttcaggataaaataatcgacggtatgagtatagggattattataaatatataatgaacctactgttcccctgtttgatgatgaccattcattaacttttacgtctgccggacgcgtctgataatccagagtgatattagccgttttatcactgctgttaccgagagttgcgccataatcggcggcattcagcttatgaaatgtcaggtcattcccgttaacatccagaacccccccccggtagccccaggatatattgtccggattaacctgctggttgtctgccagcacgactgtcgggcggccgctggcaatattcacgctactgaatgcctgaacgtgtcctgaactgtcagcctgctgattgaggacaacggtcccatccccgactttcaggccgccctcattaacaccggttccctgtacaaccagggttccttcgccgattttatgcaggttgtcacctttcacaccattaacctgccagtttacggaggcatccttgtccacaataataccggccccggtccaggtacttccgtttgaagtggtgacagtgtagtcatcagtaaatgtcagtgaaccggcaccctgcgtgacagagttttccaggtcaatctgaccattatgtcccaggaatgtcagatttttacctgcgttcaggtcagaacctttttgcccgtgcatggcatattcatcggaaccctgtttcagagagccagtgccggtgctgctgtcaaatttccattgcaggggggcgccggatgaggcattaaaaaagacgggagcgtcattatcctctgaatagatctgtgagagaaaactctgaggaataagagaatatatcaaattggtcccccctcctactcccgagtaaacaccgaccagttcccactgccctttggccgtattccagccaaataatggagaaccactgtcgccggcctctccaaaagagggcaggatgctatgatcatgtatgttgccccccatatacagctgaatgccgtctgagccgtgataaaagaatgatgtcgggagtattcctcctgtcagataaccatacccacctgttacccaatgtcgcttaccctgactatcctgaatatactgacttcccgaaccagccctgtagaatgccgagtattttgaagggttcaatatatcagctgttgatgagctggttacggtagccggagcaacctcagttacgagcttatcaagtcttggtgtgtggagatcagatgaactgtgttcattacgatccacaatatggtaactgttctgaccatcaccgaagctgacgctctgatatcctttattatgttttacactggctatatattgcgggttaattaatgttgcaacgccgggatttgagcttacattcacactgctaaaatcaaccatgggcgctttatcaagatgtcctactaattcccctttattattaaaaataggaatgtttgttgcgccagcctgaaactgccctttgttttctgcaaagtcgcggtatgtctggtaaggattgttgccaccaaccgttgatgcaccagcaacggttgggagtaatgcagatagtgccagagaggtaagtactgaaagtctttttcctctgcgggtactccctttacatacccttcgggctagttcagagacaacctttactgtgttagtaatataacaatattttagagcgtatattttattcatagtaaatgattccggaacgtatattccaaagttacattaataaccatagacaatttcaaacgaaagtattgttgaattgcgcgctaattattaattagctatataattataaatgtgatatatgtcacatttatttttgcttaaaactacaatattttgtagttgcacgcattctttgtctgtggttttcgttggtggtaatgaaaatgttgtttgctttttctcaggtgttttgacttatgacttaaagtcataaaatatgcgacgctaatacaactacagaaaaatggtatatatggatatcgacgatatttgttgatttttattttaaattgcgtggcggttcagagcggatatatatatcaccataccatcatctgtttttctgaagttcagattagttttaacacactgttttccatcttcgttgattacaacagtctttttaatgtatttacgaatggcatcattcgacgttctaacggatttagtcgatggtggggtaattaataaaacatttgctgtaatcaaaaacggtaatgtcttcaattgatagaagtttctggtaatctactggtatttaaggttttccatggctaccgttactgttcattgtccgcgctgtaattccgataaagtttatcgacatggtcgtagttgttcccagcatgagcgtttccgttgtcgttcatgtaaacgtgttttccagctcacttactcttatgaagccagaaaacccggctttaaggagctgatcgttgaaatggcgcataatggcacaggggccgtgatatcgccagaacactgaaaatcagcatcaataccgtcatacggacattaaaaagctctcgccccagcggataacatctgcgtcagtcagctcacgctgatgttgcccttatctgtgaacttgatgagctgtggagcttcgttggcaacaaggcgcaacaacactggctctggtatgcgtagaacactaaaactggcggtgtgttggcttacactttcgggccacggaatgatgaggcctgtcgggaattgttagccctgttgactccgttctgtatcggcatggtggccgcgatgactggggcagctacgccagagaagtgccgaaggagaaatacctgaccggcaaaatcttcacgcaacgtattgaacgtaacaacttgaccctccgcacccgcatcaagcggctggtaagtaaaacaatctgcttctcgcgttccgttgcaatccacgaaaaagtcatcggttccttcattgaaaagcacatgttctactgattggaagcactacccaacgttcaacttatcatcataagtataaaaatcacaaaatgggaggtaagagtctttacctggattgtctcgaaatgcaaagtgtgcttgctttacaactaaatctgggggtatctaatgattgcgtaatagtttttttatatacatatcaatgtcttgctttttacaatctgtttatattatccattttaaatcaataggttacacatcgttaataccttccttattttttgattgggacagatttgggaccgatgggttcaggatcgaatctatttaccgtgcgtgttcggtaaggtgattaggtgcgagatgagcatatcgacgaaccatttcgagagtttcctatccgctcatttttaagtgcaagcagggaaacaccggaccaaaccaatcagctgttcgaaaatggcaagcggattaatatgccatggcggctttgagccgcacgcatggggtgtggcaagcctgatggatgttactgtgcttgtggtggcgtctttgctggtctggttgttggttaatcgcgaaaatcattatgcctgaggaataccacaggacgttcaggttttgcataaaaaagcccaccattaaggtgggcaaaaggaatgatttatattctctgagagaaacattacatttctccttgtcacttctaacataaaaatatggagaaataatggagcttatattaattggcgattaggtaaccatgtggttatacaaaacaatacagttctttacatttgccttgttttatgaatactcctaaagaggtgtataacataatggtacaagcagggtagatatgaatatatttgaacaaactccaccaaaccgcagacgttatggtcttgctgcattcattgggctgattgctggcgttgtttccgcatttgttaagtggggggcagaagttccattgccaccacgtagtccggttgatatgtttaatgcagcgtgtggtccggaatcattaatcagggctgcaggccaaattgattgctcccgtaactttctcaatcctccgtacatttttcttcgggattggttgggactgacagatccaaattcggctgtttataccttcgccgggcatgtctttaactgggttggtgtaacgcacataatcttttcgatagtttttgccgttggttactgtgtggtcgccgaagtatttccgaaaattaaactttggcagggcttactggcaggtgctttagcgcaactttttgttcatatgatttcattccctctcatgggacttacaccacctctctttgatcttccgtggtatgagaatgtctctgaaatttttggacatttagtctggttctggtctattgaaattattcgcagagatttacgaaacagaattacccatgagccagatcctgagatccctttaggctcaaatagataatgctttgaatgataaaaatggcgcaaatatagcgccatttttataggttaaaaacgttgcttttcatattctgatgcggacagtcagtgatcatatcgcgctacttcaggatgatgtagatccggagaacgctacagaagaagaggcattgttgctggaaaatggaagaagtttcaggttttgttgtccctgaaaaacgaagccccgctattacagctggcggggcaatgcaattaattattgtatatttataacggtgttagcccgtatttagctcttgcacgattgcaagcctcattgacttctccgttctcaccagacatggcgaattctctgcatgtggacgatcgattttcatatatcgtgcagcaggcattttggcccggtgttcctgcaagggcaatacatcggggatttttctgattagtaccgctcatgcatcggtgaaaaggggatatttgttcagtgagcctggcgggaatggtaccgccagcatcgtcggcttcggcccagtaaaaagagatgcggaaaaatgcacaacaggcaccacacgtcatgcatggattcagattgctcataattcaccagtacagctataaatcgtaaagagaactgcggtacgtcgtatgcagggacgtatcgcggttggctggtgtactttcgatagtgtgagtattgaatgatttccagccgttaccgattttacgtcctaattagtgaagaaaccactcgttagcaggccgcctggtacctttccgtgtctcctgaacactgtggtgtgcatatgagaaagctcatcggtgacattgacgatcgcttccacatcatttaaacgatttttgagtctctgaggtggaattcttccctcgtccgatggataagtcttagtccgccgaagggggcttagccggacaggaatcgctaatcttaatgaatttgtcgttatagaccagatagtgattccccggctgacgtaactcaggctgatgaaccacgtctcccggacgtagataccaggcatcgccttcctcttcggtcgaatcacatcctggtttaatcagtagcttaaaccacgtgttgccggtgttacttaccgttccggtcacctgatcgaaggaccatttaaactgaacctgacgtggtcgtactaccagaatggtatccatcaccaccaccggctccgtgctgacctcaccgccgcttgggctgcgttttgtcaggttacgagtggggacctcgcgaaatgagacccggtagtagcgctcgcggttatcccgtggaccatgatagtaaaatttaaaatactcgctctcaccagcctgcaacgccagctggcggggggcgaaaagtagttcaccatccaccggtcgggtgcgcaattcactgctgcccgggctatcaatagcactgatggcaatacggtatatccgtgcgcttttgttgttattcacgacacgtttgctgacaaagtcagtctcggacggcagtgaaaaagtcagattgccgaccgaaatcgcctgtgtcaaaggtgccgccagcatacagaccactgtcagcagggccttagttaatgttacgccacgtcgcctgaacatgaatctctcctgaagcgctgacttcgccaaaccagccgttatcatctaccgtacgcagagaaatggcgttatccattggaatcgaaaatttgactgtggtcttatccatctgccccacttcgccagagatatcagtccacggtgtggtcaaccacagcgcatcggtcatatcccgccagctatcatcgcacccggcatcgtaggtttttgtagctccgttgcgggtaataaaggaaagtgtcgccgggaacggtactttcgccttaccgtcatcggagctgaagacacaataggagcgcccgccaatcacctgcgcgggtccggtcaccttgatcagcacttcgtcggcagctgttttaccgctggtggttacgatatagccgaaatcgagtgccgactcgccgctgccaacatatccctcccgcgacggtgtctgagtatattcatcggagataatactgatgctgaaatcacggggtttgataatcagcgtgttggaggtagaaaattcataccagccagactccggtgatgtggtgttctgaaagcgaaagttgaatagatctttggtgttgatatcgctgatcccgaggttcaccatctgcttaaagaagttgctcgagaagaacacatagatcgagtctgcgctcttcatctcgttgaaggtgtagtaataggcagtattgctcaccggtttccatgaactgccattcagactgaactgcatatcgtacgccccgacggccgaggctaacgacgagttggcgatcgccgggaatatatggattgaggtgttgctgagtccgttcgtttgcagggtatagttaaccatcttacaacttaatcctgaacggctgccgatggtttgcgtccggcagtcggcattcccttcgcccagagtcggtactccgtcgctgttgataaatacttccgccagcgagtgggtatttatcaaccgcagatttgctgctttcgtatgggtgacgttgcgaacataccagttgccggaggcctgatccttacagcgtgcgccgctgctggcgtcatagttcacagaggtctggcaggcattgatggtcattgtaaagctgctgccgacgggcatttgttgcagatactggtaaaacgcgtctgacaacatgccgtgcatccatttcgcgccgccgctggtcaccgtcgcgccataaaatccactggcgtcggtggtttgcggcaggataagactggtggtcatattacaccctgcgtaccagttgatgcagcgcaagccagttaaaggagatgaaactggtgaattttccagccacatatcaaacttccagttggtataaaggccggtgttgtaaccgttatcaatgtagccgaggctttgctgatagatggttcctgaaccattgtattttaaaccggtccagcggttggcaccggtcaggcgcggatccagcgccccgccaggagtgacgaaaaagttgtcgtctgagttgttttcgacaaacacaaactcgcgtgccggagcatccgcccaggttgttttgctcactgccgctctgagcgcggttgcaggccagattagcgcaaagattatcatcgctatcagtaggttaactctcattctcttctcctgtctgcgtcaccgccgcccacgatgagaggccgctgcagaccacatcaccgacccagacggcaccgcgcgcctggttgagttccagtgccacttcgcaggttttattgccactgtagcgaaaatcgatagtggggtatttcttatccacgtccatgacaaactcgccgttttcatcggttcgggttcggccgatatggttgttaatccgtgcgttagccagtagtgtgccgtcttccgcacggatacgaccggagacggtaaccatctgcttcacctctggctcaatgacagcgacattgcctggatagagagtcagatgacttttgcgaccgctgacgatatcgtaactgtcgagtgagtttttgctgttctgcaactccacctcatatcttccatagggagagagcgggagatagttacgcttgccgttaagcgggaaaatccgcccgttgattttggcgctgatctgaccatcgttctccaggccagtgtcgaatatcaccccagcgttgccatcggtccgcccgctggcagcgatgtttttaccctgccagccgacgctgccgttggcggtcaaattggtattgatgtagccgtccgccgcgctattgacgttcagcgttccgctggcgtaacgagcgtcgaactgtgcatacgccccaccgctgagggttttgtcatcaccggtatcgccggagatggctcgtgacagattggcaccaacagtgcgaatggttccttcatcaaactgtttgcgtgctgacaggtttgccatggtgtagccgttttgatgggtcatccctgcgctaaaccagttgcccagtggtagcgagagatcgagagcgatatatttccctgtattggcgctgctgtcgccgttgttatagcgctgaataccggcccgcaggccaagcgaaccaaaggtaccgctgtagacactttgatagtaatctgccgtgtaataatggctgttgtagcggcggtcatcattgtagctgatgctgaacgtacccagcttcgaccacagtgagttcaggttgagtgtgccgccgattgcacggttgtcggcatcgctacgtcgcaattgattgccaatgcgggttttttcctggttaacccacagcgaactgaagcctccaggtagagtggcgctgatgccggcgatgttgctccatgagctgtcactggccagcatgttttgcaggttaacgttgatcgcccccccaagcggcagcgtcagacgggtttcacccaccgcctgattatcgtatccatatcccgttgccgcccagctaaacgtactcagtgagccggaggtcgaggcacctgccagccaactctctttggctggtcgcgtctttttcccgttttccgaccagcgatccatatgaaagctaccgccccatatctgccacgccagcggtgcaccgacgccacgtccccggctaaacagcttattgacccgctgggtgcgtttgctgatcacgcgaccgttaacgattacctcaacttccacatcgtaaataccgtacggtagaccccgggtatccacttcatgattgcccatggtgaagttctgaacgcttagtagtcgcccatcacgggtgagatgtacttcgcccgccgccggtaaaaaggcgatcactggcgtggccgattggctgctgtcgaagatggtggagctggcctggtttccccaggaaaggccgtaaatcttccctgctgaaatggcggtcatcggccctaaggactgcaagttccaggtgtcgagcattccaccggcaaatcggtgaccagcaaaatcgcgttcatacatcgctttatataattcactgtcctgttgaccgctaccaatcccgtacagtgagccgtcgagcaccacgtgatgttcgcgcagcgcagtaacgttattcagcgacagatagctggaggtgttgctcccgccgttacgcaactggttgttatagacgccgaagttatagctcagattactgctgagggtgttaacactggactgcccgatgtcttcgctacgtgagcgtagtacggtgcccagcgcttcgcgcttgaccaccagctgcagcagcagttggcgcaagctgagatccaactgcgcgttgtcagtcagggggatggtaagggcctcattgaacggggcgttggccagagtcgtcagctgctgtcgagtttgttcgctgacactggcgttatcttcactctcttccagctgtatttttcggatgcgtaactgtccatcatccaaccagataaaagcgctgccgattcgctgatcgtcctggcgaccctggctaccggcgagatgaatatagagcgggacgctcatgccgtcctgaagcgcctgactgaaggcctgcggaataatcaccccacctatttgctgcgcacttatgtcagcagcgctggcatcgggctgaacgaacaaaaagaccatgccgaaggcaaactgggctttcagtcctggggagaaccgtcgtaaaggcattgtcgttatccatctgcacagctatctatttcacgggaatgaacttatcaccctgccaaagtgcaacccgtcctttgttatccgccgtgtccacgcgggtaaaacgacgcgacttgcccggcatcaggtagtaattctctttacactccttaccattggcggctttcaggcaggggccgtaggcgaggatccgcaacgtcgcatttcctgtatttgtcagggagccgttggcgtactgaaagtggtagttcgcctggcggggtgcgacgaccagaatggtgccgatgcgggcggaagcagtggccacagcgctacggttggcattatcgcgctgcgcatcactgagggcctgatcaaaccagacaatgcggtagtagcgctctttttcatctgctggtcccttatagaagaagcggatcacttcgctggcttgggcgggtagcagcaagctggcgggagtgagtagcaactcatccggcttgtccattgcgataacctgcccgtcgtcaagcggtgaagagagccgttcgagacggatattgatgaggcggccactgtcggtactgttttggatcgttttgctcagcgtgctgctgtcactgttcataaacgatgatatatcgccgacatccagcgcctgggccggtgatattccggaaaacagcagagcgagaggcagaaggtgctttttcataacaattccgtccaggaataaagcaggggggtacccctgctggtacatcagagagattaactggtccaggtagcgtcgaactgtacgctaacgtcgccgctccagatgccttccggtagagtgctgtaatcggttactgcggtggtaccattggtggtgccgctgatgatggagaaagtgaaaccatcctgtgcggtggtacgattgctggcattgtaaccgttagccagtgggctaaggttgccgcccagtacgccgttggcggtatcgatcatcacggtatcgccagttttttcgactgccgcgccgttataatccacgcccacattcagtgtggaacctgaggtatccaactgggttaaggtgttggtgataaggcgtgaggtcagtttaaaggcggtagccgttgagtcaccctcgatagccacgtcaaatagacctttttgtgagttaaaacctttaatgccttcggcatactggaacgccaggctaccgagtggcgtcacaaccagcttactggtggtgtcttttttggctgttgctgaccaggtcgctacagcctgagctgttacgtcagcagcctgcgctacacctgtaccggtaaacaccgttaccagagctattgccagaaccttttttttcattgcttttcttcccgagttgaattgaggacatgaagtcccggtgagtcattttttaaaactaacttgcctggagtttactgaaccaacttatataattttgagtacagcttggcctctgcattccgccgatgggtatacactgtcttcacactacaattttcaattctggcaatcgatttaggcagcattccctgagccgtcatgcggataatttccatttcccggtcagtgattttatctttcttaatatcttttctcaggaacctgccattaatcacataggccagttcttttctaatatcacgactcagtccagcgtataccacgcccctaatattgctgttgtaataccaataatttgctaaggcttctgactttctggccgcaatcaatacgacctgtttcccctttaccgcggataaccactcattatcacggtttataaactcagttaaagaatccgtattgagattgataaacacgaaatcttttctgattttctccagcgatagataaattaatctgtcgatatccacaatcagttcagatagtcctttatagaagtaggcgtcatggggagaccagatgtatttatcagaacggttttgacattccatatggtttttaacctcatagtccctgctgtaatcattttgccatgtcactactttccaaacctgtaatttttacaggtacattcagtttctttagtaaatcggaagtaaataagatacgtagcacatatcaatataggttaaacgagattaagttttaattatttcgattaggtttaaatttatgtttttttcctgatgagtgtcaatatgtgaacagaaaatgaattccatggttaagtcaatatttacaaaaaatgaaaatattgcttttttgataagaagaaaaagacattcagtttcataaggttattggcaatataacgttcaattcttacttgcattttatattagccaggaactttgccctgaggtgttaggaatagtcttaatgtgttgtgtaatggactagtaaaaaaacaagtttaaatgataagaaatagaatataaaactatcataagtcataattaaagatgatttgccaatcagtaaggtgttttaatggattaacatgccgcacaaaatggttatgggtgttcatcccaataagtgatgaaaaattaaacaggtgtaagtacgtcatctgtccggtaagccccccaagagccaaattaagtgaagttaaacgaagactgccagttgtcacaggaacgatggcctctttgccagggcactgcattcagtcatctgtacgcgttactctaactggcactcgaacgtcggcgatggggttaccgatggatctggccgttcctgtggcgtaaacgtttttatgtcagtaccaacagatttaccacatttatcatcttaacagtttgagtgtaaatgcaggctgcgtcgcaaagggaggaaactgagtggcgtgttcagtctaaaatagagttgatgccagcatacagggcgcagctggtcaacaagtcaacattaatataatggaatattcggagagaaacgtcaggcagttgaccttaaatgaacaggaagatacatccccaggaaaattaatgctggtgtaataaatacaccaacattaatccggtctgattattaatcagacaaatatcgttaattcgtcgaattttaaatcaacgttttttcttacgaccctgaacggccttaaaacgtggattagatttacaaatcacatacagccgtccttttcgcttcacaatctgacagtctggatggcgttcttttgcggtacgcagagagttaaggactttcatcatgccccctttttcgtgctaacaaaacgaccaaaacgttgggtgaaccgtgcaacatttccttctgatgccactgttctcagcttccctgtatagaacgggtgcgatttcgaagagacatcaattgttacgtacggatacgttacgccatccagctcaatctcacggtctgttttgatagtcgagccgattttaaagtactcatcaacgctggtgtcgtggaacaccacagtacgatactcaggatggatattgggtttcatcatttttacctgttatgttataacataaccgtaaagatacatgctcatccggatcatttcaacacccaatcactgtgactatttgtgggatgtggaatttccgcaacggggaagtctggcattgttagcagccattggcgacgctcccataaacgcctggatgagtgattgatgatggtttcgctgagagtatggatttttcgagaatggaggctatctccactttactggccgatgatttattgcagcatgattgattacctgacaatgtgtattcctctcccacggatataataattacttacaaaaaagggagaggatgcatattttaaatatcactgaagtgaacagtttattgccgttattaatagaaatggagaaataaataggcgtattctacaattgcgacaaaaacaacgatattaatcagtttatgactgatttgctgtactttattctctttcattggtacttcctcgctttaaaaaagagtgcacttcgtaagtgcccttatataaataacgagtttggtcaaccaattttttgacatgtatcacaaatttgaatagatgtattacatcggctatcttttattgccccaatgtcattgatatatgtcgcctgaaatcagttacgggaatgagtctgatctcaagactggcccagtcctggcgttgattggcgctgaggagcatatcgcatctcatcgtaacgtcgtatctcctggggtgttatacaagatatcgttgtaggtaaccagggagaggaattgagtctattaaaccgtcaactatgccggatacatactggattacactgcaggcacgccttacgagagaacgtgccgcagtgacgggttaattatctgaaagaatttgcgaggctgtatcggttactcattgatttgatagttttactctcgggagagtaatcgatatttaatccattaacggaaaccagccagttcctttcgatgcctgaatttgatcccatagtttatccggaatggttaattcaggaacgcgttgtggattaagggctgtttgaatttcatgacttctacctgattcagctaaagtcacccattctggatttatcaccagccctttaccgatcgcaacaagtggcaggccagcggaaattgcttcttgagcctgagacggtgtgcgtattttacctgcggcgattaccggcactctgcctgcaatatgatttaaaatcaattcaatagttcgggggccatttggcgactcaacagggtagctatcgttaatactgaccagcgaggtatgtatatacgaaataccggatgaaatgagccgatcaaggagtttataagtatcctctatccgcagcccccctgttacagattcttcaggagatattctgtaaccgatagcaaagggctttgtcgcatattcatagactacattttttacttcctgtaatacggccagcgggaagcgcatacgtccttcaagatctcctccccatcggtcattacgctggttaaatagaggggagaagaaattctgcagaaggaatccgtgcgcaccatgaagttcaacgccatcaaaacctgctttaatcgccctttttgtgacatctccgaatgctctaatggtttcctgaatttcgttttcagtcatttccctgctttgtaccactctcttcataaagtcaccagattttacgcttgatgcgctggcactaataacatcgttatttggcacaagctccgggatggctttattaccggcgtggaaaatctgcaaaatagccggagcaccgccacttttggctgcagctgctaacttttcaaggctgttaatgaaacggtcgtcatacgcggcaaattcatgagtaaacccaatgccgcttggcgtgacataggtacatcctgttattactaaaccaacattttgtgagcgacgtttataaaattcgagttcttgctcagagatggttccatcaggattagctgaccaggttgtcataggagccataacgatacgattacgtagctttattttttctgtcagcataaaaggagaaaacaatgatgggtgtttatttgtcataacaatacctcaaatgtttatctgattttaatgcgtataatcttaataagttgagttgctgctttttgatgcttttttctttaatagaattctttttgagtaatttcattattgtcgtgtagtcaataaaggataaatgtcagggagataatgaatctccctgcaaggttattacaaatgtgttttgtaaaaaggaattaatttatcgagcgcctgtttcacaggttctggcttatcatacaggtcgtaatgtgaataaccttcaaccacgaccagttctttatgttttgaggctgcacgaccaataatttcgcagccgtcacgataggcaccaaaagcgcccactctatcgcccactacaaccattagtggttgagttaacaggacttctgcaagatgaaaagcatcccagcccacggcaacagtctgatgtgaaaatagcgaacgatttaccccattaggcgcacagcctcgtggcgaacgataatattctgttgcttcaaaaaggtctatttctgttaatcccgcttcaagagctgcttccggagaagaagggagcaaatcatctacgcgaagttttgcgccgttagcttcgtctgttctttgttgcgccattgcttcgagtgctccgataggattaaacgctgtaaatccctcacgcataagacgcccgtagtttgcacccgtgacagtaccaatggctttaatccgacgttctgtcattgcggcattaatggcatatccacctccaccacaaatacccagtacaccaatacgcccggcatcaacgtaaggtaaggtggtaaggtaatcaacgacaatgctgaagtcttttactcgcattgttggatcttccagataacgcggttctccaccgctgcttccctgaaaactggcatcaaaagcaatgacgataaagccagcttttgccagggcggcaccatacacactacccgatgtctgttctttgcagcttccaattggatgggcactgataatggcaggatactttttttcactattaaaatcgtcagggaaatagatatcagcagctatatcccagtaagtgtgttttatcgaaacagttttcatttcaagctccagggatttgcctaaacagatttaaatatcatttctattatccgcaactggcattcgtgttcatatcgcgaacggcgtaatagtatgacttgtattggttatcatcaatggtctaatatctatcacagtgttaagttaaggtttacaatgatgaaaatagagccttcaattttgccttctcttgcctggtttgcgctgattgttcgtgccggcagtttttccagagcagcctctgaaatgggtattacgcgggccgcattgtcccagaatttaaaatctcttgaggaacgtcttaacaccaagctgatataccgtacgacccgcaatatgtcgcttactgaggaaggacagcatctgtatgaagtgctggtgtcggctttggggcaaattgatgatgcgttgaaagatgtcggtgatacccaacttgaacctacaggactgttgagaataaattcctcccgtgttgcagcaaggatgcttgttgaacctcatattggcgagtttcttactcgttaccccaaaacaaagatagaactcattatggatgacggtttatctaacattattgcggacggctgtgatgtgggcatacgtcttgagcaaggactggatgagcatatgactgccgttcctgtttctccgcttattaaactggttactgtggcatcgccagattatttaaaagaacacggtattcctgaaactcctcaggaattgagtaaccataattgtcttcggttgcggcataaaagtagcggtgcactctcagcatgggagttttcgaatgttgtggggggtaatgaagagttcgaaatagaggtgtcaggtaagtatatttctaatgatgacgaaagcatgatacgaatggcgctgaatggaacgggtatcattcaacatctggattttgcaatcgctgaacatatcaatgcgggcaagttacagccgattcttgaggattgggccgtttcatttcctggattttatatatatgtttcatcacgggtgagaatgccctctaaagttcgtgcttttattgattttatggtggagaaaagagtaaaaatagaaagttaatgatgtgtgtcagaatatcggtaagaagaatggcgcaatcgtgaggatacgtttattcataataaatctcctgaaagtttagaattattttcgatacagccagattatcattgttactaataatgtggttaaaataatagcatctatgccccccttcatgagtgtctgtgaagaggatgcttctacaaggaaatcgccaatgctcaaagaaaacttcaacgaactgcaaatctttcttgtggtggcaagagagcgaagttttaccaaagcagcgggcaaactcggcgtctctcagtctgcacttagccatgcaatgaaggctctggaggaaaggctcaatatccgcctcctgacacggactacccgcagtgtggctcccacagaagcgggggagagaatcattgcctgccttgaaccgcgtattgacgagcttgaacaggaactggaatcacttattcaattgaacggcatgccctccgggaatattcggttatctgccggggaacatgccgcgcgaagtctggtctggccgaagctaaaaccttttctcagagagtatcccgaaatcaatgtcgaactggtggtggataatggttttgtcgatattgttgaaggccgttttgatgccgggatacgactgggtgaaaatgttgataaagatatggttgcagtcaggattggaccagatatgcggatggctgtggtgggagctccggcgtattttgctgcaaaccctgcgcctgaaacgcctcatgagctacaaaatcatcgctgcatcaacatgcgtttgccaactgccggtgggctttaccactgggagttcgagcgagaagggaaaccgcttcgcgttaaggttgatgggcaactgacgtgtagtccattgccagaaagaattgatgccgcgttatcagggtttgggatcgcttgtgtccctgaagacatggttcaggagtatatagagtcaggcaagcttattcaggtgttacaggagtggtgtccaacttttcctgggtattatctttactaccccagccgcaagcagcatccgccagcttttgcgttgttgatcgatgcgcttcgctacaccgaataacgggtcctttatcctggacccgtttgggtattagcggcctacgcgtgcctgatgttcaggcgagtaacgttcaccgacgattttaattgtttccagcgcctcgcttatctgctgcgtatctttctgcgaaagaacaatgtcagcagcggccaggttttcttccagccggtgcagtttagtggtgccagggatgggaacaatccacggcttttgtgctaatagccatgccagtgcgatttgtgcagacgttacccctttctccgcagccagttcacctaacaaggtgaccagtttttcattggcttcaatggcttgtgctgcgaaacgcggtacggtgctgcggtaatcatctttgccgaaagtggttcccggcttaatcgcccctgtcaggaaacctttacctagtgggctgaaggggacaaaaccaattcccagttcctcaagcaacggcagaatttcctgttcaggctcacgccaccacatggaatattcgctttgcagggcggtgacaggttgtaccgcatgtgcacgacgaatggtttgtgctcctgcttcagacaggccgaaatgtttgaccttaccttctgcgatgaggtctttcaccgttcctgcaacatcttcaataggaacatctggatcaacacggtgttgatacagcaggtcaataacatctgttttcagacgacgtaatgatccttcaacggcttcacggatatgttccggacggctgtttaaaatctgctgcttattatcattgccgaaggtaaaaccgaatttagtggcaattaccacgcggtcacgaaacggttttaaggcttcgccgaccacttcttcattcagatacggaccatacacttcggcggtatcgaagaaggtgacgccacgttcaaccgcagcacgaataagttcgatagcctgacgggtatcggtcgccgggccgtagccgtggcttaagcccatgcaaccgagcccaagggcggagacttcgagtccggatttacccagataacgtttttgcattgaatgaatacctcttttatcgcggcttaaacatcaagtttgcggccagtcagccattccaccattgcgggatcgcggtgagagaagaacgcgctggttgcggtatccagggcggtaatttgcagcatatcttcagggctgagttcaaaatcgagaatgttgatgttctcttccatgcgttcttttcgcactgattttgccagtgaaacaatgcctcgttggtagatccagcgcagaacaacctggcccacgcttttgccatacttctcgccaattgccgtgagaacaggatgctggaacagaccatttttcccttccgcaaacggtgcccaggcttctggctgaatgccacgactttgcatccagggaacggcctgtagctgctgattgaaagggttaacttcaacctggtttaccgccggaacgacgttattaaaagcgataaggtctgccagtcggtcaggatggaagttactgacgccaatagcgcgaattttaccggcctgttgcagctcttccatggcacgccaggctccgtggacatcgccatatggctggtgaatcaagtacaggtcaacgtaatcaagttgcagtcgattcagagagcgttcgaactgggctttggccccttcgtaactggtatcctgcaaccagagtttcgtggtgacaaagagttcgttacgggcgataccgctttgtttcagtgcgttcccgacctggatttcattttgataagaggcggcggtgtcaatcagtcgataaccgctgttaatagcgtcaatgaccgctctttcgcattcggcggcatcggtcatctgaaatacaccaaagcccaacaggggcatttcaataccgttgttcagttttactttttgcatggtgttatccttccgttatcgttcatgagaagcataacgtaaagggaagagctcgattagacggcaggatttgtcaggggttatgaacaaaattcataaatctgtttgagggttgagattagtcgtgcaagttcgatatccccggaatttacagtccgatgaataaaaatgaatgtccataaaaaatatattggtttatcccagcgtatatacttacttcgacgtactcccaatagcagttaattaaaggcgggtcattattattcactctgaataatgaattattcactgcccgcagagtaagaaatataacttaagtatctatttaatgacttgcacaaaaagctaaatttttacccataaataaaaatataatcccgcgcccaaccacctgatgagtggctacagacactggatatattaggtggcggtgtactttcttacataaaggtatttccttttctgtggaaaaggaaaccgggaaatccccggtttttctgacaagcagacgccattatttgtgtctgcctatgttcgttaattcgttcatcaggaaattatctcaatgtcacgttataaaacagacaataaacagccacgatttcgttattcagttctggcccgctgcgtggcgtgggcaaatatctctgttcaggttctttttccactcgcagtcacctttacgccagtaatggcagcacgtgcgcagcatgcggttcagccacggttgagcatggaaaatactacggtaactgctgataataacgtggagaaaaatgtcgcgtcgcttgccgctaatgccgggacatttttaagcagtcagccagatagcgatgcgacacgtaactttattaccggaatggccaccgctaaagctaaccaggaaattcaggagtggctcgggaaatacggtactgcgcgcgtcaaactgaatgtcgataaaaaattctcgctgaaggactcttcgctggaaatgctttatccgatttatgatacaccgacaaatatgttgttcactcagggggcaatacatcgtaccgacgatcgtactcagtcaaatattggttttggctggcgtcatttttcagaaaatgactggatggcgggggtgaatacttttatcgatcatgatttatcccgtagtcatacccgcattggtgttggtgcggaatactggcgtgattatttgaaactgagcgccaatggttatatccgggcttctggctggaaaaaatcgccggatgttgaggattatcaggaacgcccggcgaatggctgggatattcgtgctgagggctatttacctgcctggccgcagcttggcgcaagcctgatgtatgaacagtattatggcgatgaagtcgggctgtttggtaaagataaacgccagaaagatccacatgcgattaccgctgaagtgaattacacgccagtgcctcttctgaccctgagtgccgggcataagcagggcaagagtggtgagaatgacactcgctttggcctggaagttaattatcggattggcgaacctctggaaaaacaactcgatacagacagcattcgcgagcgtcgaatgctggcaggcagccgctatgacctggttgagcgtaataacaatatcgttcttgagtatcgcaaatctgaagtgatccgtattgctctgcctgagcgtattgaaggcaagggcggccagacggtttccctggggcttgtggtcagcaaagcaactcacggtctgaaaaatgtgcaatgggaagcgccgtctttgctggccgcaggcggaaaaattacggggcagggcaatcagtggcaagtgacgctcccggcttatcaggcaggcaaagacaattattatgcgatttcagcgattgcctacgataacaaaggcaatgcctcgaaacgtgtgcagacagaagtggttattagcggagctggtatgagcgccgatcgtacggcgttaacgcttgacggtcagagccgtattcaaatgcttgctaacggtaatgagcaaaagccgttggtgctgtctctgcgcgacgccgaggggcagccagtcacgggcatgaaagatcagatcaagactgaactaaccttcaaaccggctggaaatattgtgactcgtaccctgaaggccactaaatcacaggcaaagccaacactgggtgagttcaccgaaactgaagcaggggtgtatcagtctgtctttactaccggaacgcagtcaggtgaggcaacgattactgttagcgttgatgacatgagcaaaactgtcactgcagaactgcgggccacgatgatggatgtggcaaactccaccctgagcgctaacgagccgtcaggtgatgtggttgctgatggtcagcaagcctacacgctgacactgacagcggtggactccgagggtaatccggtgacgggagaagccagccgcctgcgacttgttccgcaagacactaatggtgtaaccgttggtgccatttcggaaataaaaccaggggtttacagcgccacggtttcttcgacccgtgccggaaacgttgttgtgcgtgccttcagcgagcagtatcagctgggcacattacaacaaacgctgaagtttgttgccgggccgcttgatgcagcacattcgtccatcacactgaatcctgataaaccggtggttggcggtacagttacggcaatctggacggcaaaagatgctaatgacaaccctgtaactggcctcaatccggatgcaccgtcattatcgggcgcagctgctgctggttctacggcatcaggctggacggataatggcgacgggacctggactgcgcagatttctctcggcactacggcgggtgaattagacgttatgccgaagctcaatgggcaggacgcggcagcaaatgcggcaaaagtaaccgtggtggctgatgcattatcttcaaaccagtcgaaagtctctgtcgcagaagatcacgtaaaagccggtgaaagcacaaccgtaacgctggtggcgaaagatgcgcatggcaacgctatcagtggtctttcgttgtcggcaagtttgacggggaccgcctctgaaggggcgaccgtttccagttggaccgaaaaaggtgacggttcctatgttgctacgttaactacaggcggaaagacgggcgagcttcgtgtcatgccgctcttcaacggccagcctgcagccaccgaagccgcgcagctgactgttattgccggagagatgtcatcagcgaactctacgcttgttgcggacaataaaactccaacggttaaaacgacgacggaactcaccttcaccgtgaaggatgcgtacgggaatccggtcaccgggctgaagccagatgcaccagtgtttagtggtgccgccagcacggggagtgagcgtccttcagcaggaaactggacagagaaaggtaatggggtctacgtgtcgaccttaacgctgggatctgccgcgggtcagttgtctgtgatgccgcgagtgaacggccaaaatgccgttgctcagccactggtgctgaatgttgcaggtgacgcatctaaggctgagattcgtgatatgacagtgaaggttaataaccaactggctaatggacagtctgctaaccagataaccctgaccgtcgtggacagctatggtaacccgttgcaggggcaagaagttacgctgactttaccgcagggtgtgaccagcaagacggggaatacagtaacaaccaatgcggcagggaaagtggacattgagcttatgtcaacggttgcaggggaacttgagatcgaggcctcggtgaaaaactctcagaagacggtcaaggtgaaattcaaggcggatttcagtaccggtcaggcgagcctggaggtagacgccgctgctcaaaaagtggcaaacggcaaagatgcctttacgctgacggcaacggttaaggatcaatacggcaaccttcttcctggcgctgtggtcgtctttaatctgcctcggggcgtcaaaccgcttgcagacggtaatatcatggtgaacgccgacaaggagggtaaagcggaactgaaagtggtttccgtgactgccggaacctatgagatcacggcgtcagcaggaaatgaccagccttcgaatgcgcagtctgtaacgtttgtggctgataagactacggcgaccatctccagtattgaggtgattggcaaccgtgcagtggcggacggcaaaaccaaacagacgtataaagttacggtgactgatgccaataacaacctgctgaaagatagcgaagtgacgctgactgccagcccggaaaatttagttctgactcccaatgggacggcgacaacgaatgagcaagggcaggctattttcaccgccacgaccactgtcgcagcgacatatacactcacggcgaaagtggaacaggccgacggtcaggaatcgacgaaaactgccgaatctaaattcgtcgcggatgataaaaacgcggtgctcgctgcatctccagagcgtgtagattctctggtggcggacgggaagactactgcaacactgacggttactctgatgtcgggtgtcaaccccgtaggaggaaccatgtgggtcgacattgaggctccggaaggggtgacagaggcggattatcagttcctgccgtcgaaaaatgaccatttcgcgagcgggaaaatcacgcgtacatttagtaccaacaagccaggtacatacacattcacattcaactctttgacatatggagggtatgaaatgaaaccagtgactgtgacaattaacgccgttcctgcagatactgaaggcgctgaggagaaataaaaacgacgatgtaataaataataatggcgttgacatgcgcagcgccattatttactgaatacctaccctggcaccgattagacggtggcagggtagggtaaatcttatgtgatggagttacaggctaaaccgggcgaacggggataaaaatttcgcaaacaatgttattgctatcaatttcgacgaagttttcattgtaataaaatcgctcaatatcactgccgttcactctggctaaccccctggcaggtaattccatcagatagaggtttcgcgcccattcagggtagtgctcccactcaccttcatagcggaaagagacatacagtcctcggttaattgtccactctttcggcatctctgaatcggtttgtttgcataccgtaccggcaaaagtttcaactgtgagcaaatcgaccgattttgttgatggttcgaacgtggagacgaaatagatatccgtcttaaaattcttcatacatctgactaaatgatgacgtcgcagtttgacttcttcatccggtaatttattcgacacttcaatatcatatttaaatgaattgccaaaaataggtgtctcaggaaagttgactaatctacactccgtcttttgctgttgacgtattaaaaaagaagggaagatatttgcgagatcccaataatcacggtggcggtattcacggggagagcagccgaataactttttaaattcgcggctgaatgactgctgtgaatcaaaatgcaaagagagtgcaatatcaagcatagatttcgcggagagccggacaagaatggcggcacgacaaagccttcgtttgcgaatgtattctcccaaaggcacatgcatgaaatttcggaacagaagctggatgttgcgtctgctgtagccagatttctgtgcgatatcttcgattgaaatagggtgctcaagattgcactcaatccactccaggagctgctgtagaatcttctgcctgatcatcacatactccgttaattctttgtcatatcgcacattttcgttatgtcctgggccctaagtgtatcaaaaacagcaagtcccaaggcaaaagcactgatagcgtctgcttcattgccccaaaaatagagaggtttcagtcctacattattaatgaattttttgcataagtgatatcaaaatccacatactaatttgaggttacgttttaacgtagactcattgttcatacctaatggagggactgacagtggaattttccgtattaagtaacaatctgaaaatgccgatgatgggatttggtgtttttcaggttaccgataaagacgtgtgcaaacagtcagtgttgaatgctatccgcacgggttatcgactcatcgacactgcagcggtatacggtaatgaagatgccgtcggtgaagccgttcgtgaagccatatctgaaggtttatgtacccgagaagagttatttataacgtctaaattgtgggtgcaggatatgttgaatcaggatattgcagcagcaggtattgaagcatcattaaaaaaatcggggctagaatacttcgatctctatttattgcaccaggccatgcgcgattattttagtgcgtggcgtgcactcgaagatgcctatgaagagggcaaattaaaagcgattggggtttccaatttctaccctcatgttctggcgaacttttgtgaaacggtaagagttaaaccgatggtcaaccaggtcgagttgcatccctattttgcccaaccagaggcgctggcaaccatgaagtattataacgtgcagcctgaagcatgggctccgttaggtggtggacgacataaaccctttgaaaataatctgcttcagagtattgcagatgcccatcaaaaatcgatttctcaggtcattctgcgttggaatattcaacggggagtggtcgttattccgaaatcgacacatcaacagcgtatcgaagaaaattttgctatttgggatttctcactgacagagaaagaaatggcgcaaattagttcgcttgatttgggttatgttggggaatcggtaaaacattttaatcctgagtttgttcgtggttgtcttgctgtaaaaatacatgattgatattaatcacttattttacctgagacgacaagaatcttttaataggggagtgatattgaccttcactctgtcatatctccggtaatatggcgtcaggcttcatcatcagaaagggagcctgacgcctgaaaaagtgaacaacagacagtgttcggattatcaatattcagtttttaacgttgaactggattcattactgcgttgtttaagaatatcccgcgccgaatctgccattatcatgacagcacctgccagcatcagagtatctttcaataccagacgaccagcaccggataaataagggaaaccatgatgagcgtcacccaatgcgggtacccatgcctccggggtggtgattaaaaatgagagtgttaccagcggcgtggtaaatgccatcagcccacccaataaacctaaccagcgattgacaggattagccaaaaccagcagagcaataatcacctccacgacgccaagaccgttggaaaaaccataggtattattagccgtttgccatgctcttgcttctggtttgtattcgccttcgtgagtcagatgctgtttatagtcttccgggtgttcataaaagaacgacattagtggactgtttgcgacgaatggtgtaatgctgtctgcctcgtaagggacaaactttaataacccaatccacataaaaacaatcgcaatactcagacgaatcaatgtcaggccaattttatctccccgacttaacaggtgcaggtatctttccattgtaaacatccttatttatacaatactgctgttgcggttgaattattatcaattcgcatcgatgtaactttccaggatgaagcattatattttctggccatatcagcaatggcattctcaagaactgtcggtgatgctgatactgatgagacgctgatatgtttcagaattattttatcatctgcattggtggaaaatgccataacgccagataatagtgttgcaaataaaacagattttttaaacatataaaataccatcaatgaagtgattaagaagttataaagtaacagggaattaataagattcttttctctgagacgccagaatatttgttctggcgtctgattttgagtttatttgactaatgaaaatagatcattgagtgattcgctcatcgacggatgagtaaatatctgatcgcgtaatatgctataaggcagcccggcatccatcaccattttcactatattgatcatctcgtgggagtcaacacatagcagtgatgcccctaatatacgttgggttttattatcaacaatcgcttttaataccccacgagtatcattcatcactctggcacgcggaattgcagctacaggcaatgtcaccacctgaatatcagcaccactctctctggcctgttcttctgtcataccaaccctggacagtggcggtgtcatgaatacggaataaggcacatttttccgatcatcagtactacgtctgccttctcccagcaattcatcacgcacaatgcggtaatcatccagtgaaatgtaagtaaattgcagcccgccggtaacatctcccatcgcccaaatattgtttgcggtggtatgtaattgcttgtcaacgacaattgccccgcgctcgtttactgcgatacctgcattttctggatgtaacgaagcggtagccggttgacgaccggaagctattaacagtgcatccaccgccagttgggcgtgctcgctatgcacttgcacttgattttcatggtgactgattcgctccacatgggcattgaggattatatcgacaccctgatcgcgtaaaatcgtcgcgatattatcagcaatatcccgatcttcccgaggcaaaaacagcgaagctgcctctaaaatggttactttgctgccaaaattagcgaacatagaggcgaactcaacgccaatatatccgccgcccaaaatacctaaatgcccaggcaattcttttagattaagtaatccggtgctgtcatatacaccaggcgtggtggtaattccaggaattggcggaaccacggcttgtgcaccggtattaataaaaattttctcgccatgaatctccagatttctcccaggccgatgaacacgcaggctatgattattgataaactccgcctggccgtcgatcacgtcgatattgggcatatccgcaagattatgaaaattcttattacgtaaaaaattaaccacttcatttttacgctgtatggcacggacaaaatctgtgtgctgctgtgcgtcatgaaccaatgttttggttgggatacagccgatattaatacaggtcccgccatacattgcatttgattgttcgatgagagccacacgccaacctgcttttgccagcgtgacggctaatgtttttccagccttgccaaaaccaataataactgcctgatatttattcatgatgatttcctgtcgaaacgcgttcatttgacatcatgactatagacgcaaaagagcaaataacatttcttcacaacgcttgatattttgtcttatcgtctggtattttctttttcttaatcagaatcacaaaacaaaaatcatgattaactatttgatggtattagattaattattgactaagattgttggtgtttgtaatcaaaaaaccactcaggagtctgatatggatgctcttagccgtttgttgatgcttaacgctccacaaggaacgatcgataagaattgcgtgttaggaagtgactggcaacttccacatggtgccggggaattgtcggttattcgttggcatgcgttaacgcaaggagcggcgaagctggaaatgccgacgggagagatttttacattacgcccgggaaatgtggtcctgctaccacaaaattcagctcatcgcctgagtcatgtcgataatgaatcgacctgtattgtctgtggcactattcgactgcaacattcggcgcgttattttttaacgtctttgccggaaacgctgtttgtagcaccagtgaaccatagcgtggaatataactggctgagggaggcgatcccgtttttacaacaggaatccagatcggcaatgccgggagtggatgctctgtgtagccagatctgcgctacattctttaccctcgcggtgcgtgagtggattgcacaggttaatacagagaaaaacattctcagtttgcttctgcatccacgtcttggtgcggtaatacagcaaatgctggaaatgccaggacacgcctggaccgtcgaatcgctggccagcatcgcccacatgtcccgggcaagttttgcccagcttttccgtgatgtttccggaaccacgccgctggctgtattaacaaagttgcgtctacaaatagcggcccagatgttttcccgggaaatgctccctgttgtggtgatcgctgagtcagtaggctatgccagcgaatcatcttttcacaaggcgtttgtccgcgagtttggttgtactccgggagaatatcgggaaagggtcagacagcttgcaccctgaataaaaccgccagaaatcagggcaaagataatccgcattccgggagttgtgagcctttcaactatttctatttccaacggtggttttgggttttatatatttttttgatggactctagctcagtttttaaataaaaatgcaaactaaatttcttcaattaaataaaatcccgactattacttgatacgtgattattgtcggtgatttttttgtacaccatcagtgtatatctcaataacccctgaataagtagctctgaataggtataagggatgtagcctttttaaatggatttcttatgccaaaaatgatcgtcgatttccctataaaatgtgagcgatgccgaaagaaataaaattagttattgcatttgaagtttagatgaaagattatcatttgtcatacaaatgaggggtggtatgttgctagccaattaaaaaagaacgccatatttattgatgattgatcccccggaaggggggaaccatcgggcataaatgggcatgaagtaatggagtattagttgtgaatgtcaatttctttgtcacctgtattggtgacgccctgaaatcaagaatggcacgagactccgtgctgctactggaaaaactcggctgtcgcgtaaatttcccggagaaacagggatgctgcggtcagcctgcgatcaatagtggttatatcaaagaagcgattccagggatgaaaaatctgatcgccgcactggaggataacgacgatcccattatttcaccggctggctcttgcacctatgccgtaaaaagttacccgacgtatctggcggatgaacctgaatgggcatcacgtgccgaaaaggttgccgcgcgtatgcaggatctcacctcttttattgttaatacattaggggtagtcgatgtaggtgccagtttgcaagggagagcggtgtatcacccatcttgtagcctggcccgtaagctgggggtgaaggacgaaccacttacgctgctgaaaaatgtgcgtggactggagctgttgacctttgctgaacaggatacctgctgcggatttggcggcacgttctcggtcaaaatggccgaaatatccggcgagatggtgaaagaaaaggttgcgcacctgatggaagtccgccctgagtatttaattggtgctgacgtgagttgcctgctgaacatcagtggacgattacaacgggaagggcagaaagtcaaagtgatgcatattgctgaagtgctgatgagccgctgaggatataaagatgtcgatcaaaaccagtaatacagattttaagacacgcatccgtcagcaaattgaagatccgatcatgcgtaaagcggtggcaaacgcgcagcagcgtattggggcaaatcggcaaaaaatggtcgatgaattggggcactgggaggagtggcgcgatcgggccgcccagatacgtgatcatgttctgagtaatctcgacgcttatctgtaccagctctcagaaaaagtgacacaaaacggcggtcacgtctattttgcaaaaaccaaagaagacgccacccgctacattttacaggttgcccaacgcaaaaatgcccggaaggtagtgaaatctaaatcgatggtgaccgaagagattggtgtcaatcatgtgttgcaggatgccgggattcaggtgattgaaaccgatctgggtgaatacattctccagctggatcaagatccgccctctcatgttgtggtcccggcaattcataaagatcgccatcagatccgtcgagtgctacacgaacgtctgggctatgaggggccggaaacgcctgaagcgatgaccttattcattcggcaaaaaatccgcgaagatttcctcagtgctgaaataggtattaccggctgtaatttcgcggtggcagagaccggttcggtatgcctggtgaccaatgaaggtaatgcgcgaatgtgtaccacgctgcctaaaacgcatattgcagtgatgggaatggagcgtattgctcccacgtttgcagaggtagatgtattgatcaccatgctggcgcgcagtgccgttggtgcacgtttgacgggatacaacacctggctgacaggaccgcgcgaagcggggcacgttgatggtcctgaagagtttcatctggttattgtcgataacgggcgttctgaggtgctggcctctgaatttcgggatgtgctgcgctgtattcgttgcggggcttgtatgaatacttgtccggcatatcgccatattggcggtcatggatatggctctatttatccagggccaattggtgcggtgatttccccgttacttggcggctataaagattttaaagatttaccctacgcctgctctttatgcaccgcttgtgacagcgtgtgtccggtgcgtattccgctgtcaaaactgattttgcgtcatcgtcgggtgatggctgaaaaagggatcaccgcaaaagcagagcaacgggcgataaaaatgttcgcttatgccaatagtcatccaggattgtggaaagttgggatgatggctggtgctcatgcggcaagctggtttatcaatggcggcaaaacaccactcaaatttggcgcgattagcgactggatggaagcacgcgatcttcctgaagctgacggagagagtttccgtagttggtttaagaaacatcaggcgcaggagaaaaagaatggataatcggagcaaatttttgaataacgttgctcaggcactggggcgcccgctgcgacttgaaccgcaagcagaagatgcgccgcttaacaactatgctaacgagcggcttacccaacttacccaacagcagcgctgtgacgcgtttatccagtttgccagcgatgttatgttgacgcgctgtgaactgaccagcgaggcgaaggcggcagaagctgcaatacgtctgtgtaaagagctgggagatcagtcggtcgtgattagtggtgacacgaggctggaggaattggggattagcgaacgtttgcagcaggaatgcaatgccgttgtttgggatccggcgaaaggtattgagaacatatcacaagcagagcaggctaaagtgggcgtcgtatatgctgaatatggtttaaccgaatcgggaggcgtggttcttttttccgccgccgggcgcgggcgttcattgagcctgctcccggaatcttctctttttatcctgcgtaaaagcacaatcctgccgcgtgtagcgcaacttgcagaaaaattgcatcagaaagcgcaggccggcgaacgaatgccgtcatgtattaacatcatcagtggtcccagttcaacggcggacattgagcttatcaaagtcgtcggggttcatggtccggtgaaagcggtgtatctgattattgaggattgctgagagagatatgtagtctggacataaacctgaaggcggtatacgaggttgtgaataacgttaaggacaacctgacttaaccccgttccgtcatggttatgctgcttttctgtaaatatcctgacattaataatgccaggatatttacagttaaaaagacaggaatccattcctgaagacgggctcccttcccggtcactgtcactatagttttatacaggcactctctgtcagaatgctgtttattactgcccagagttttgttggtattcatctaccatttttttgacaaggcaaaacattacagaaatcacaatacttagaaaaaatcccagagccaggcaaatggcagcagggtatttattttttatttctggtgagcttatagtgacacagccatcaccgttcggatacagtgaccagttcctggtcaggtatatcatttttgtataaagctcactgttaattgctgaaggcgtttgtatctcatcgagaacttgcctgccattatggtattctgacgtataccatttaatgatagacgcctgcacgcgagatatttccgcttcagcagttggtaaatctctcttatctcctgaccattccagctttatttctctgttcttgacatctgggctggtctgaaaaaatgtagtaattcgctgaataacatcttcagtcattgtggtctgacaggcaaagttattattgctatcacagctaacaagtatgcctggtgttgtctgatttatttttaggctgtaactcacttttatattatctttattgatatacagaaacaacagcaccattaccatacagatagctataataaaaaggataacacgaatctttttcttcagataaaataaaatctcaatcagatcgatatcctgtttgatttgttcattcataatatatccagaaaatgaaatctgtcgcagataagattgtattaatagtctgtatcaggaatgttcagggtaaatatcagcaaaaagccagcatcatgaatactggatatttatagcctgcaggcagcatactgctgcctgcagggggtataacagtcgacaggggaaccgactgctttattcttaccaggtcacattgataccaactacaccctgtagcgggttctcaatgtcgtcacctttggtgtagtcaaggcttgcatatgctcccatgtttttggtgatatcagcttgtacacctgcacccacgcggaatgctgcaccgtcaatgctggcattgacagactcatcacccagacggactttgttgccatcagagaattcgttcagtgcggccagattcagataaggtttaacggtcgcgttgcccacagcgaagtcataacccacgcgcgtaccggcctcacccagcacagagttatagctgtcagaatgaacgtccacgccgttgagttgataatccacaccttccagagtcagagcagacagtttggcatatggctgaataaacaggccattaccgtctttccatgtgtaaccgcctttaaccatcgcaccaaaaccattggtgttaaagtcagctttgatggtaccgccaccattcatcaggcgaacatctgccgtgttgctgtagtgaccaaactgtgcagcagtatcaatgaagataccgttgttatactggcggctcaggtaagcgtggaagctgtaaccttcagtgtcacctttgctctgcatggtagtcatgtcacctttcgcagaagacatcgccacaccggccagccagctaccatcttcagtcatgaagcgggtatcaccacccagcattacaccatttacatccaggtcataggatgcatttcccgcggtggtatgtttctgtttaccgccaaagtactgaatccatacgccacccttgtcattttcgctcagacggacagcatcctgacgggcggagagcgtgtcagcctgcagattagcgacgttagccggagcagctgccattgcctgaatcacggagctggcgttggatgctttatgcgtgttttttacgaaataaaagttaccatcagctccctgtgtcaggtcatattgatacagaccaccttccgttgtgcctgtggcttttagagtgctgtctttgccggtagaaataaatgccgtttgttcattgataagatccaatgaacccgcactgtaaacacgcaagtcaccgctcgctttaccgctgatatccagagtgttttcagaagaggcatcaacaatcagagtgccgttttgagaagcaaacgtgccagtattgactgtagccttcgtgatattaaccgtactgtcttttactgccagagcatcaacagttgaggaacccgtaacattccagacagacccgttttgcagagatacactggcatctcctgcccctgaaactttgcctttccagactgaactatcggaaagatttatatccagatcactacccgctttatcgccgctattgaaggtataagcattaccttcccagtaagagcgggcaacgttcatatttacatttgttgtggtactggctgaattctcgctttcagaaagggccaggacatcagagtagatggttgaatcagcaacagacaaatttaaattttgcgttgctgaacctgcgccttgtgccgaagcagaggcataaattgtttgtttattattagccgccccaattactgagccatccttaatattcaggttgactgtatgaattcccgtcttattcccggcagtaactattgtttcaatcccgccattaataatatttgagtcagcaagggtgatgttgtcggttgcatcaccgtcaaaaccctgcaacaaattacccttttgagcaaaaattgccgtagagccgttgctgtaactcttattaccttgagcatttatggttgtaccattgagcgttaaattatttcccgtggtcgcttccagagatatccctgtcgcactacctttttcattttttgcaacgaaattaccgccattaacaacaacatcgccagttgaatcaatgaccattgcagtccggacataggtgccttcaccttgagctgtgatggtggagtctgtagcattaatcacaacatttttgttaccactaacttttacaccttcaacgaaatcttggtttaccgttgatgcggcggtaatatcgtgaccgccaaaagtaacattaaggtctttatctgaatctgacgtttcaattgttacggctgtaatcttgttatcaccgttaataacaacatcttgatccagagtcgtcttctctgtattcagcgtaaccggatcagttgataccgtgctatcagtagcgaatgctggtgcagaaagagccataacaatagctgtcgctaatgcgctgcggtaaaataccttactgtttttcatgaagaaattctccattctggtaactaatttcaatttcccacttatttatatttatgcagagataaagcctgcgtccctgcatttaccaccacggaatacctgttggtatttccgttttcacgcaatgtcatggcattcgttgtttccaatgcatttccatcaccgtgaaaattattgctgctcagcagcagggcttcccgcaatgacatgctgtccggtattccccaacgcttttttagcgactgctcggcaagccatatctgtcttatccccgttttgagaaactgcgcactgtattcccagctgtgtccggcaagaagtaacgacaacaccttcttttgcttttccgggaagcgttctgacatgacgattgtctttgtgcagttattcacctctttcataaagacagagtaactgtccataactggcaaaatttctgcatgcttcagccctgaaaacccaccagaggcatttgcaatactgatgacacgctctactgacattcctggtttcagtaacctcaggtttttgagaacgccagaaatactcacatccggtggcagaaaaaagggcgcgacgcacaacaccaccacgaatgagtgatcccgataaaatcggaaccacatttcagcgcattcggcaggtcgccctgccgatatcacgacactctgtggcctgtgccgcaatttattgcgtaactcctcttctgttctgatgcaggtaacattgccgacagaaccggttgatagagctgcgaactgcgctggtacaattcctgagggacagaaaagaacgaaacgcatccttccctcacagatgtcagtacgccagcacgctgtacaggctgtacagcgtgcctcccaatcctgcagcccagaacagtagaaatattttggctcctacactgtagcgagtccgtatgcgccgcagtgggtggtagtaacaacgctgctgtgtcataacaatcctggtctttttttagatatattttttctttgtccggaaagtacttttccggaaatggcgtcagaatttattgattcaccaacggcaactttctctggataaaggattccggataccatgttctgcacatactgagtgagtcgatgagcggaatgttgtccgatatattttgcatgtagccgtatattccgtttcactctgctgtcaccgcatcccgtatagagcagcctgaaatcgctcagtgttcccagtccaagtttcattaaagcccgtgtggcaatcgcatgcagggtctttgaactgcgttgttcataacgggcaatctcactgaaactcataccctgcatcagaatcttaagcacgctcaactcccgtgcagtcaggagccagaaatcgctcatatcgccgggcaaaggacgcagtaaccagcggataatttgattctgataacgactcgctgtcagcatggtgccgatgcgtgggaagccgttatacagacttgcagcaggagcattatcgaaccagtcggagtcaccggtcaggcagacctgccattgcccggcatcactccgcaaacgggcgagacaagccagaagaaccaactcccctgaaggaagcgaagggatatcagctaacaggtagccacaggaggtctttaaaacgaattcaacctctgtagtgacgttgctgtacacccgcacgatatacctgtccgttgggatgagagactccagtgccaacctggtgaactgacaggcactgataataaccagaggcttcttcattcagactcgtccacgccattgctacaaaacctgacattttgattcaaaatgtcaggtttggtttaatagcctgaatatttaattttcttggaatataaatctaatttgtttggtttttattgtttttaattttgtgttatttaacaatatgggcgaaagttaatcactggtatgacctttgtgattaatcattttaaatcatggggttattttaatttagctagaaatatcaacatgttatgtgttttatttaattgaatgggctgtttttttatggaagaattgaggaaaacgtaggaatctgacattttgaatcagaaggtactgttttaacgaggcttttttttccacacccctttaaaacgagcagcattactggctgtgtatctgacagtatgctgaatatttcgatgacccagataatcctgaagtagtcgggtatcgacaccattgtcagccagagcaaaaccacaggcatgacgtaacatatgaggatgtgcttttacagctaatcctgcacgttttccagcctcacgaatgatagaaaaaaaatgttgtctgctgatagggcggcgtttccgggagagaaaaagccagtctccttcaactccgttttcaattaacttcctctgcttaagccacaacttgatcaaattatattcatcaggaagaagaggatgtgttgtcgagaaaccatttttaatacgccgaatattaagttgttttccagatgcatcaatatcggataaacgtaaatcaagaagttcactggccctaaaaccgtgaatgaaagccatcataatcagacagcgatttctttcaggaaaggacatgctctgggctgcatccatcagcctgtagacttcatcctgtgtgagatattttctcgtcatacgccaccgtgtacagttgtaaaaaaaagagaggcacacccagataagtatgcctgcaatcagaacgttatcgatgtaatctcattatctcattaataagattttttgaatagtagttctacgcaacagattaaatatgaactatttattgtgcagcttttctacaagtcatttttaatgcgtgtttttatctactataatgtgaaaaaataaatattaaaactatgagtgacaggtcgtgtgggatgtgtattacgtctaacgttttagtaattttttattagttatgagatatttaacatcatttcctgtgagattgtcttgttgtgtatccaattgattttacttttgtttttttgatgcataaatttggaggatagaaagtaagattagcttaatatcaatgatatgaatttgtaaatacatattgttgcaaggtgttctttacttttttggtcgtgagtaaatcattgttaatgggttctactcataaattaaaaatattcatttaaatgatttttactttttgtatatctcaatttgtttattttgcattcatttgatggagagtattccaacactttttatttttcgcaaaaaacttattaacaactttttattatcaattgaaaattaatgtaaactaaaatgttagcgaagcgataatcttgtgctaaaaaatatttaagcatgatgattaattaaagaagagtaaaaataaatcactgctaataaattatacgaatcgtgtttaaagctccatgtggttttggtctgacttatttttgtactcgttacaagaacccttttcgtatatgctaaccgtgagcgggaatgaacaggtaaccatagccaggaacattagcggcgtaattcttaagctgagtggtatttcatctgtagtttatctgtgtatgcatagcaccttcatcagccagattgagcaagtcagcttagaatttgctggcgagattgtcacgatgaagcatgagagttacctcagtgttttatataaggattcggtcctcatagtagaacggtaactctcaatctgatcggttcctgagtcagttcacatcacgactcattttttcgctctcaccggcatcccatttgccacaaaatatcccgccgtgctcctcggcaacgcttccttcccacgaatcatatccgctattttctcgccaatcataatcgtcgtggcgttcaaattgccggtgataatttgcggcataattgacgcatccaccacgcgcaggccttccagcccgtgtacgcggccttcgccgtcaaccacagccatctcgtcataacccattttgcaggtaccgcacggatgaaacgcggtttcggcgtggttacgcacgaactcatcgagctgctcatccgtctggcattcgacaccagggctgatttcgcggccacggtattgatccagcgcgggttgatgcatgatctcgcgggtgatgcgaattgcgtcgcggaactcctgccagtcctgctcgtgcgacatgtagttaaacagaattcccggatgctggtgcgggtcgcgggatttaatccgcacatgcccacggcttggcgagcgcatcgatccgacatggcattggaagccgtgctctttcactgcgttcgagccgttatagttaatcgccactggcaggaaatggtactgaatattcggccacgcaaattcctcacggctgcgaataaatccgcctgcttcaaagtggttgctggcaccaacgccggtgccgccaaacagccactccgcaccgattctcggctgattccaccactgcagagcagggtagagggaaaccggttctttgcactcgtattgcagatacatctccaggtgatcctgaagattttcgccgacgccgggtaattcatgcaccagcggaatatcaaactccgccagcagttcagcgttgccgacgccggagcgttgcaggatctgcggtgaagcaatcgcgcctgcacataacagcacttctttattcgccgccgcgcgggtcggaatggtgctgtcgccttccagccactcgacgcccaccgcgcgtttgccgtcaaaaatgatgtgatcggtcatggcgtgagtacgaatggtcaggttagggcgcgatttggcctgatcgagatagccacgcgcggtgctggcgcgacggccatgcggcgtgacggtgcgatccatcgggccaaaaccttcctgctgatagccgttgagatcgtccgtgcgcgggtagcctgcctgcatgcccgcttcaatcatcgcttcaaacagcggattgacgccgggtttggaggtggtgacgctcaccgggccatcgccaccgtggtaatcgttctcgcccacatcgcgagtctcggccttgcggtagtagggcaggcagtcgagataactccagttctccagactaggttcttgtgcccagttatcgagatccagcgcattgccacggatgtagcacataccgttgatcagcgatgaaccgcccagacctttgccgcgtccgcactccatgcggcggttgttcataaacggttcgggttccgtctcataggcccagttatagcgtttgccctgtagcgggaacgccagcgcggcgggcatctgggtgcggaagtcaaagcgatagtccgggccgcctgcttcaagcagcagcacggttgtgttcggatcttcagtcagacgggtagcgagaacgttgccggctgagccggcaccaataatgatgtagtcaaattgcaaataaacctcctggttagaatatggactggaatttagccatctcaacctggatggacttcacctgggtgtaactctggagcgtcatcacgccgttctcgcgaccaatgccggagtgtttgtagccgccaacgggtatctctgccggggattcgccccaggtgttgatccagcaaatacccgcttccagctgatgaatgacgcgatgcgcgcggttcaggtccgccgtcacgatacccgccgccagaccgtagtcggtatcgttagcgcggcgaatgacttcgtcttccgactcgtaggtcagaatggacatcaccggcccgaaaatctcttcgcgcacaatggtcatatcgtcgctgcaatcggtgaacacggtcggtgcaacccatgcgccgttatcgaagctatcccccttcagtacattgccgccgcacagtacgcgcgcgccttcctctttgcctttggcgatatagcgcagcacgttatcgcgatgcgggaagctgaccagcgggccgaagttagtttgcggatcgaaaacgtcgcccgcgcgaatgcgctcaacgcgcgccagaaccttttgttcaaatgcggctttgcatttcgtcggaacgaagacgcgagtgccgttggtacacacctgaccggagctgaagaaattcgccatcatggcgatatcggcggcgagatcgagatccgcatcgtcgaaaacgatcagcggtgatttaccgcccagctccatggtcacttctttcagggaggaagctgccgagttagccatcacttttttgccgctggcgacgccgccggtaaatgacactttggcaatgcccggatgatcggtcagatattgcccggtctccgcgcccacgcccggcaacacgttaaatacaccgtccggcaggcccgcttcgctgtaaatttcagccagctttaacgcggtaagcggggtgacttcgctcggtttgaagatcatcgcgttacccgccgccagcgcgggggcggatttccacaaagcaatctggatcgggtagttccatgcgccaatccccgccactacgcccagcggttcgcggcgggtataaacaaatgacgtctcacgcaacgggatctggctgccttccagcgccgggatcagcccggcatagtactccagcacgtccgcaccggtaacgatatcgacggttgaggtttccgaatatgcttttccggtgtcgagggtttccagttttgcgagttcgtcattgcgttcacgcagaatatcaacggcccgacgcagaatacgcgagcgttccatagcggtcatcgccgcccagattttttgcccttgttgggcactcttcacggcgcgatcgacatcctcacgcccggcggcctgcacggtcgccagcacgttaccgttggccgggttaatggtctcgaaggtgcgaccgctggtggcggaggtataaccaccatgtatataaagctgctgttctgccattcgggacatcacgtctcctcggttaatcggtgggtaaatgctgagtaataaagtgacgggtcagcgagtgtgcgagaggtttatccagcggtttgccgctcagtgccgcgcgcagccataatccgtcaattagcgcggcaaggccgtagcccgcttcctgtgcctgttggcgcggtaactcgcggcgaaattcgctcaccagattcgacaataagcggcggctactgacctgctgcaagcgatagagcatcggctgatgcatactgctggcccagaaggccagccaggctttcatcgccgcactgctcacctgggtttcatcgaagtttccgccaacaatcgcctgtaatcgccgctctgcactgccctgcggaagtgcatgtaatcgattcaaaaccgcgtcacgcagctgactggtgatatcgcgcatggttgcttccagcagaccatttttgtccctgaaatagtggctgatgatccccgtagaaacgcctgcacggcgggcgatctgcgcgatcgttgcatcgtgcatgcccacttcatttattgcttccagcgtggcgtcgatcagttgtctgcgccggatcgactgcattcccaatttgggcattttcgccactccattcatcagcgttgtttatctattaaagcggttattgattggacgttcaatataaaatgtgtcttaattgttactaatttgattttaaatggtaacagtaacagtggggatactggatgacagacctttcacacagcagggaaaaggacaaaatcaatccggtggtgttttacacttccgccggactgattttgttgttttccctgacaacgatcctgtttcgcgacttctcggccctgtggattggccgcacgctggactgggtttctaaaaccttcggttggtactatctgctggcggcaacgctctatattgtctttgtggtctgtatcgcttgttcgcgttttggttcggtgaagctcgggccagaacaatcaaaaccggaattcagtctgctgagttgggcggcgatgctgtttgctgccgggatcggtatcgacctgatgttcttctccgtagccgaaccggtaacgcagtatatgcagccgccggaaggcgcgggacagacgattgaggccgcgcgtcaggcgatggtctggacgctgtttcactacggcttaaccggctggtcgatgtatgcgctgatgggcatggcgctcggatactttagctatcgttataatttgccgctcactatccgctcggcgctgtacccgatcttcggtaaacggattaacgggccgataggtcactcagtggatattgctgcggtgatcggcaccatcttcggtattgccactacgctcggtatcggtgtggtgcagcttaactatggcttgagcgtgctgtttgatattcccgattcgatggcggcgaaagcggcactgatcgccttgtcggtgatcatcgccactatctcggtgacatccggtgttgataagggcattcgcgtgttatcggaactcaacgttgcgctggcgctgggattgattctgttcgtgttgtttatgggcgacacctcgttcctgcttaatgcactggtgctgaatgttggcgactatgtgaatcgctttatgggcatgacgctcaacagttttgccttcgaccgtccggttgagtggatgaataactggacgctcttcttctgggcatggtgggtggcatggtcgccgtttgtcggcttgttcctggcgcgtatctcgcgtgggcgtaccattcgccagttcgtgctgggcacgttgattattccgtttaccttcacgctgttatggctctcggtattcggcaatagcgcgctgtatgaaatcatccacggcggcgcggcatttgccgaggaagcgatggtccatccggagcgcggcttctacagcctgctggcgcagtatccggcgtttacctttagcgcctccgtcgccaccattactggcctgctattttatgtgacctcggcggactccggtgcgctggtgctggggaatttcacctcgcagcttaaagatatcaacagcgacgcccccggctggctgcgcgtcttctggtcggtggcgattggcctgctgacgctaggcatgctgatgaccaacgggatatccgcgctgcaaaacaccacggtgattatgggcctgccgttcagctttgtgatcttcttcgtgatggcggggttgtataaatctctgaaggtagaagattaccgccgtgaaagtgccaaccgcgataccgcaccgcgaccgctgggtcttcaggatcgcctgagctggaaaaaacgtctctcgcgcctgatgaattatccgggcacgcgttacactaaacagatgatggagacggtctgttatccggcaatggaagaagtggcgcaggaactgcggttgcgcggcgcgtacgtggagctaaaaaacctgccgccggaagagggacaacagttggggcatctggatttgttggtgcatatgggcgaagagcagaactttgtctatcagatttggccgcagcaatattcagtgccgggctttacctaccgcgcacgtagcgggaaatcgacctactaccggctggaaaccttcctgttagaaggcagccagggcaacgacctgatggactacagcaaagagcaggtgatcaccgatattctcgaccagtacgagcggcaccttaactttatccatctccatcgtgaagcgccgggccatagcgtgatgttcccggacgcgtgattgttattgcataaaaccgcgccatgtctgcatatggcgcggtttctcttacctcttgatacgttatatctgtacagttaagcccttagtatcgattgatgattgccaggcaacagataataaaaaagaaaagaactattgaagcccaaaaactacgtttggactgttgtgaatgttcaataagcttagtcttatttaatgtaaatattggtgctaatttgaaatgacgctttattcatggggaacgcgtagcgcaaatcaactaaaatcaatgtaaccgtttgttgtttaaggtttaattgtctgtgtctgatattttattgattgttttaaatattgtttttattgtcattgttataatgttggctatctattgctgaatggattcagtcttaaaaagcaggttgttaagggataggcatggagtaatgacgtgtatgcataaccaacatctttactcattatgtcattgaatgttgacgctatgtgtttatgaggttgaggtattttcagttgatctggattgttaaattcatataatgcgcctttactcatgaatgggcgtcaatacgtagtgggaaattataaatatcgaaatagtccaactacttctttattaccaaaaatgagtatctgaattttaatattgcattcttgcgtgattatctcctgagtttgacttgtgattacctttttaaggtatttagcgtaactgtttttgagcgagcatcagaggtaaagataatcttcttgatagtgatgtgggatgttatacgtatggcatcgctaatgtttatggttaccccttatgtgtgctcaggaatccacaggtaatcactcatactgaacagcgataaaagataaaaggtgtgttcatgaattcatgtgattttcgtgtttttctgcaagagttcggtacaacggttcatttgtcattgcctggtagcgtatccgagaaagaacgactgctactcaagctgctgatgcagggaatgtctgtaacagaaatatcacagtacagaaatcgcagtgcaaagaccatttcacatcaaaagaaacagctctttgagaaactggggattcagagcgatattactttctggcgggatattttctttcagtacaatccggagatcatatccgccacgggtaataatagtcacaaatatattaatgataatcactatcaccatatcgtcacgcctgaagccatcagtctggcgttggaaaaccacgagtttaaaccgtggatccaaccggttttctgcgcgcagactggggtactgacgggctgtgaagtgcttgtccgctgggaacatccacaaacgggaatgatcccaccggatcagtttattcctctggcggagtcatccggtcttattgtcataatgactcgccagctgatgaaacagactgcggatattctgatgccggtaaaacatttgctgccggacaatttccatattggtatcaacgtctcggcgggctgttttttggctgcgggatttgaaaaagagtgtctgaacctggttaagaaattaggtaacgataaaatcaagctggttcttgagctgacggaacgtaatcctattccggtaacgccagaagccagagcgatatttgacagccttcatcagcacaatattacttttgcgctggatgactttggtacgggttatgcgacctatcgttacttgcaggcgttcccggtcgattttattaaaattgacaagtcgtttgtgcaaatggcgagtgtcgatgaaatctccggtcatattgtggacaatattgtcgaactggcgcgtaagcctggtctgagtatcgtggcggaaggggtagaaacccaggagcaggcggatttaatgatcggtaaaggcgttcactttttacagggctatttgtactctccgccagtaccgggtaataaatttatctctgaatgggtaatgaaagcaggtggttgatgtaaaccgctattcacagcgcatcgggaggttggcagcgattaattctcccgatgcagtaaatcctgatagatccccgttaatatgccatttggcgcaaattgttttttaatccactgcgtcacctgaccggtggcagagtgctgggttgcgagtaacatgcgtgaatcctggcgcgggttatggatttgtcgggtaaccagcaaggattgcgccatcgcctcacggaccatgtaatccggcaaaaaaccaattccttcacctaaaatctggcactgacatttggtgttgaaatctggcaccagaattgactcctgcccatgcagcaaccagcccacttttttattaatcgtatgcgcggtgtcctccaccatgatattagggtagagacgcagctggctttcggcgatcggctccggcacaaaggctaatgggtgatccggggcgatggcaaaagcccagcgaatcgcgccaatctccgtgtaatcaatgccgccaccgtccagcagcgtgtcgggggcgccgatagcgatatttgcctgattattaataatcgcatcccagacgccgttatacacttcggtggtgacggtaatctggcaggtaggaaactgctttttcagcacctgtaataagcgtgcggtgtgtttgggcgtataaagcagctgattaatacaaatgcgcacacgcgcttctatgccctgcgaaatagtatcgatactgcgtttaatggcatgaaaatcattcagcaggtcggtagctttgcggaaaaaataacgcccggactccgttaactcaatgctgcgggtactgcgagtgaacagcaccacatccagccccgtctccatacgtttaatggtgtagctaatggcggaagtggttaaacccaactcttctgcggctttactgaagctgccaaaacgcgcagcggtagtaaatgccaacagattctcttcggtaaaaattgagttcattgacccgctcccgccattttcgattctgaatttctccagccatgactgtagaggtatccattaaagatggataatcatttttgaataacttttaatacccgtcgcttttggtcgtcgcttcgcttaatttttgtccgccgtattctgaaattatccccacgcagttacccgccagaaaacccagtaatgtcaccgtccagttcatcccgctggcaaaaaatagcgtcatgccgagaaagcctccgggaataaaagacagtaaccagaaacgcccttgccagaccaccaccgccgagaagggtacagtcgtaatcacgctcgcccagaacgcggacagtccactcaccggggccagccaaccggcagccagcgcggcgaaaaacgcccacaccatcccggaataattaaccgccaggcttttgataaaccccgatttaccgccgcctgcggcataaaaactgcaaaaggcgacgaagccaatggttcctaataattcccatccctgagagagcccgacatgtgaagacactaactgccaaagccctgcacaaataccgacggtgacacccgttgccgtgagtccgttcatcttgttcccctctggttagacatggacgaaagctactcttacatgtgcagactatagagaaataaaacctgattgagtgaaagggtatcgggtcaaagaaacaaatattgcactaccgcacacggcgaaaagattgttgaacatcattcaacaaaaaggcgaaatacggcgaattaaatttaagcgggttcttttatcagattatcgttgctattctcaattcatcgaaaacagccacaaaaaccaggggaatgtgaatgactataaaaaatctacctgccgactatttattggctgcacaacagggcgatatcgataaagtaaaaaactgccttgcgctgggtgtcgatattaatacctgcgatcgccacgggaaaacggcaattacgctggcaagtttatatcagcaatatgcttgcgttcaggcattaattgacgccggagcggatattaataaacaagatcatacctgtttaaatccttttttaattagctgtctgaacgatgatttaacgctactacgaattattttaccggctaaacccgatcttaattgcgtaacccgttttggcggtgtcggcctgacgcctgcctgtgaaaaaggccatttaagtattgtaaaagagcttttggcaaatacggagattaacgttaaccagactaaccatgttggctggacaccgttgctggaagcgattgtgcttaacgatggcgggattaaacagcaggcgattgtccagttattgctggaacacggtgccagcccgcatctgaccgataaatatggcaaaacgccgctggaactggcgcgggaacggggctttgaagagattgcgcagttgctgatcgccgcaggtgcataaaccgggaggcttgttatcaacacaccagaaaaacggtgtgtgtgggcgctaactgcggatgctgattttctggcgcagcgggggcaaggacaggttgaacaggtctttgccagagcggtaaatatcgtactcccggctcgccagcagttgctgacgctgctttgtgaagagtacgacaatgcgcctaacagttgtcggttggcactcactcactttaatggtctgttccggcatggtgataaggttcagtttgacgatcaaggcattacgattggtcaacatcatcatatagagatgagtcattgccagcgttggctgtccccaaccatgcaaatgaccgctctgaattttcaccttatcgcctggcaacagtggcacgacattattcatcagcacctgggggaaaatgaaaccctgtttaattatcgcggcgataatccgttttatcaggcgttaaataaagaactacatattaaacgtcgggcagttattcaggccgtaaacgataaacaaaatatcgccgtagcggtcgccagtatgatgggcttagggattggccttacgccatcagccgatgattatctgaccggactggtacttattttatttatttccggacatccggcggaaaaatacaaagaggaattttatctcggtttgcaacgcggcagaaataataccacgttattaagtgccatcacgctggaagccgcattacaacaacgctgccgggaaaatattcatcgttttattcacaacattatttatgacatccctgggaacgcaactcaggcaatagaaaaaattaaacatattggctccagttccggctgcgacatgctgtatggcatggccgatggttgtgcgctgagccaaacttacggagggaattatgtcagttaaaatagtcattaaaccgaatacctattttgattctgtctcgctgatgtctatctccacgcgtgcaaataaactcgacggcgtcgagcaggcatttgtggcgatggcgaccgaaatgaacaaaggcgtgttgaagaatttaggactgctgacgccggagctggagcaggcgaaaaacggcgacctgatgattgtcatcaatggtaaatcgggtgtggacaacgagcagttgctggcggagattgaagaactgttcaacaccaaagcgcaaagcggctcgcacgaggcgcgttacgccactattgccagcgccaaaaagtatatcccggaaagtaacctggcagtgatttcggtcaacggtctgtttgccgctcgcgaagcgcgtcaggcgctgcaaaatgacctcaacgtgatgctgttttccgataatgtctcagttgaagatgaactggcgctcaaacagttggcccatgaaaaagggctgctgatgatggggccagactgcggcacggcgattatcaacggcgcggcgctctgctttggtaacgccgtgcgtcgcggcaacatcggtattgttggcgcatctggcaccggcagccaggaattgagcgtccgtatctatgaatttggtggcggcgtttcacaactgatcggcaccggcgggcgcgacctgagcgagaaaatcggtggcctgatgatgctcgatgccatcgggatgctggaaaacgatccgcaaactgaaatcattgtgcttatctccaaaccgcctgcgcctgcggtggcccgcaaagtgctggaacgcgcacgcgcctgccgcaagccagtggtggcctgcttcctcggtcgtggcgaaacgccagtggatgagcaggggctacagtttgctcgcggcagcaaagaggcggcattgaaagcggtgatgctctccggcgtgaaacaagaacatctcgacctgcatacgcttaaccagccgttgattgcggatgtgcgtgcgcgtctgcaaccgcagcagaaatacattcgtggtctgttctgcggcggtacgctgtgtgacgaaaccctgttcgcggtgatggaaaaacatggcgatgtctacagcaatatccagcccgatcctgaattccgcctgcaagatatcaaccgcagcatcaaacacaccttcctcgattttggcgatgatgacttcaccaacggcaagccgcatccaatgattgacccgaccaaccgtatcagccgcttgatcgaagaagcgcgcgatccagaagtggcggtgatcgtgatggattttgtgctcggatttggatcgcatgaagatccggtcggttccaccatcgaggcgatcaaagaagcgaaagcgatcgccgctgccgaaggacgcgagttgatcattctcgcctatgtgctgggcaccgatctcgatacgccatcattagaacaacaaagccagatgctgcttgatgccggagtgattctggcgagcagcagcaccaataccggattgctggcgcgtgaatttatctgcaaaggggaggaagcctgatgagccagtcactgtttagccaaccgttgaacgttattaacgtcggtatcgccatgtttagcgatgatctgaaaaagcagcatgtagaagtgacccaactcgactggacgccgccggggcagggcaatatgcaggtggtgcaggcgctggataacattgccgattcgccgctggcagacaaaatcgccgccgcgaatcagcaggcgctggagcgcattatccagtcgcatccggtgctgattggttttgatcaggcgattaacgtggtgccgggcatgacggcgaaaaccattcttcacgccgggccgccggtcacctgggaaaaaatgtgcggcgcgatgaaaggcgcggtcaccggagcgctggtgtttgaaggactggcgaaagatctcgacgaggcggctgagctggcggcttccggggagatcaccttctcgccgtgccacgaacacgactgtgtgggatcgatggcgggcgtcacctcggcctcgatgtttatgcacatcgtgaaaaacaaaacctatggcaacatcgcttataccaacatgagcgagcagatggcgaagattttgcgtatgggcgctaacgaccagagcgtgatcgaccgcctcaactggatgcgcgatgtgcagggacccatgctgcgcgacgcgatgaaaattatcggcgaaatcgatctgcgcttaatgctggcgcaggcgctgcatatgggcgatgaatgccataaccgcaataacgccgggacgacgctgctgattcaggcgctgacgccggggattattcaggcaggttattccgtcgagcaacagcgcgaagtgtttgagtttgtcgccagcagcgactacttctccggcccgacgtggatggcgatgtgtaaagcggcgatggatgcggcgcacggcatcgaatacagcaccgtggtgaccactatggcgcgtaacggcgtcgagttcggcctgcgggtcagcggcctgccggggcagtggtttaccggcccggcgcagcaggtcatcggcccgatgtttgccggttataagccggaagattcggggctggatatcggcgacagcgccatcaccgaaacctacggtattggcggatttgcgatggcgaccgcgcccgcgatcgtcgcgctggtgggcggcacggtggaagaggctatcgatttctcccgtcagatgcgtgaaatcacccttggcgaaaaccccaacgtcaccattccgctgctcggttttatgggcgtgccgtcggcaatcgacatcacccgcgtgggtagcagcggcattctgccggtgatcaacaccgctattgcccataaagatgcgggcgtcggcatgattggcgcgggcattgtgcatccacccttcgcctgcttcgagaaagccattcttggctggtgcgaacgttacggcgtctgagttacatgtttatgccggatgcgacatgaatgtcttatccggcctacgaatggcgcggaaatctgtaggcctgataagcgtggcgcttcaggcattggccaccacagccggatgcggcgtgaacgccttatccggcctacgaatggcgcggaaatctgtaggcctgataagcgtggcgcttcaggcattggccaccacagccggatgcggcgtgaacgccttatccggcctacgaatggcacgggaatctgtaggcctgataagcgtagcgcatcaggcagtctggcgttggtcataaccccatcaccctctgtcgcggacataacaacatgaaagaacttgtggtcgttgccattggtggcaacagcattatcaaagataacgccagccagtcgattgagcatcaggcggaggcggtgaaagccgtggccgatacggtgctggaaatgctggcttccgattacgacattgtgctgacccacggcaacgggccgcaggtcgggctggatttacgccgcgcggagattgcccacgagcgcgaagggctgcccttaacgccgctggcgaactgtgtggcggatacgcaaggtggcattggctatctgatccagcaggcgctgaacaaccgactggcgcgtcacggcgagaaaaaagccgtcaccgtggtgactcaggtagaagtggataaaaacgatccggggtttgcccatcccatcaaacccattggcgcattctttagtgaaagccagcgtgacgaactacaaaaggcaaaccctgactggcgttttgttgaagatgccggacggggctatcgccgcgtggtcgcctcgccggaaccgaaacgtattgtcgaagcacctgccattaaggcgctgatccaacaaggctttgtggtgattggcgcgggcggcggcggaattccggtagtgcgtactgacgcgggggattaccaaagcgtggacgcggttatcgacaaagatctctctaccgcgctactggctcgcgaaattcacgccgacattctggtgatcaccactggcgtcgaaaaagtgtgtattcactttggcaaaccgcagcagcaggcgctggatcgcgtagatattgccaccatgacccgctatatgcaggaagggcatttcccacctggcagcatgttgccaaaaatcatcgccagcctgacgttcctggaacagggcggcaaagaagtgattatcaccacgccggaatgcctgcctgcggcgctacgcggcgaaacgggcacccatattattaaaacctaaggacgtaagatgaaagaaaacaatagccgccgtgaatttctgagccagagcggtaagatggtcaccgccgccgcgctgtttggtccctcattgccgctcgcccatgcgggggtagctggcaccctaaactgcgaagcgaacaacaccatgaaaatcactgacccgtattactatctcgataacgtgctgctggaaaccggttttgactacgaaaatggcgtggcggtacagacccgcacggcgcgccagaccgtggagattcaggacggtaaaattgttgccctgcgcgagaacaagcagcatccggacgccacgctgccgcactatgacgctggcggtaagctgatgctgcccaccacccgcgacatgcatattcatctcgacaaaaccttctacggcgggccgtggcgctcgctcaatcgtccggcaggcaccactatccaggacatgatcaaactcgagcagaaaatgctgccggaactgcaaccgtacacgcaggaacgggcggaaaaactgatcgatttattgcaatcgaaaggcaccaccattgcccgcagccactgcaatatcgaaccggtttccggcctgaaaaatctgcaaaatttgcaggcggtgctggcgcgacgtcaggcgggcttcgagtgtgaaatcgtcgccttcccgcagcacggtttgctgctgtcgaaatcggaacccttaatgcgcgaagcgatgcaggcgggggcgcattacgtcggcgggctggacccgaccagtgttgatggcgcgatggaaaaatccctcgacaccatgttccagattgcgctggactatgacaaaggcgtcgatattcacctgcacgaaaccacgccggcaggcgtggcagccatcaattatatggttgaaacggtagagaaaacgccgcagctaaaaggcaagctgaccatcagccacgcctttgcgctggcaacgctcaacgaacaacaggtagataaactggcgcaccggatggtggcgcagcaaatttctatcgcctcgacggtgccgattggcacgttgcatatgccgctcaaacagttgcacgacaaaggcgtaaaagtcatgaccggcaccgacagcgttatcgaccactggtcgccttacggcctgggcgacatgctggaaaaagccaatctgtacgcgcagctctatattcgtcctaacgaacagaacctctcccgctcgctgtttttagccactggcgatatattgccgctgaatgaaaaaggcgagcgtgtgtggcctaaagcgcaggatgacgccagttttgtgctggtggacgcctcctgttccgccgaggcggtggcgcgtatttcgccgagaacggcgacgttccataaagggcaactggtgtggggaagtgtggcaggttgatatgcatttaatatgtctgcaacggtgaacagtaagagatttaagccccagggagtggggcggcctgagtatgagtgtgttggcagaaatggacattatctttgaagaatatgcccttattgacgttgtgtagataactatttgtctacgtgaaaatatcatcagttttgccgatttttgtcttttacggatagcaaatatcacacttataggcgctcgccttatggggaacgttgctgctctgtttcattcaggctcgcggcatgttggggctggatcgggtggtttaaatattggctatattcaatggacgcgttttgccgcgatgacatatcaggcatcgccaaatacacatagctaatcaggagtaaacacaatgaagatcaaagctgttggtgcatattccgctaaacaaccacttgaatcgatggatatcacccggcgtgaaccgggaccgcatgatgtcaaaattgaaatcgcttactgtggcgtctgccattccgatatccaccaggtccgttccgagtgggcggggacggtttacccctgcgtgccgggtcatgaaattgtggggcgcgtggtagccgttggtgatcaggtagaaaaacatgcgccgggcgatctggttggtgtcggttgcattgtcgacagttgtaaacattgcgaagagtgtgaagatgggctggaaaactactgtgatcacatgaccggaacctataactcgccgacaccggatgaaccgggccatactctgggcggctactcacaacagatcgtcgttcatgagcgatatgttctgcgtattcgtcacccgcaagagcagctggcggcggtggctcctttattgtgtgcaggaatcaccacgtactcgccgctacgccactggctggccgggccgggtaaaaaagtgggcgtggtcggcatcggcggtctgggacatatggggattaaactggcccacgcgatgggggcgcatgtggtggcatttaccacttctgagtcaaaacgcgaagcggcaaaagccctgggagccgatgaagttgttaactcacgcaatgccgatgagatggtggctcatgtgaagagtttcgatttcattttgaatacagtagctgcgccacataatctcgacgattttaccaccttgctgaagcgcgatggcaccataacgctggttggtgcgcctgcgacaccgcataaatcgccggaagttttcaacctgatcatgaaacgccgcgcgatagctggttctatgattggcggcattccagaaactcaggagatgctcgatttttgcgccgaacatggcatcgtggctgatatagagatgattcgggccgatcaaattaatgaagcctatgagcgaatgctgcgtggtgatgtgaaatatcgttttgttatcgataatcgcacactaacagactgaaaaaattaataaacatcctgtggtttaacatattaacttcgctccacttaactttttagttaaggagagcgaaataatatcaaagtagtggtaaacctatagcgtaaattcagattgttaaattaacttcactactttacacgttagttatgagcgatttctgatagtgtctggttttatcagagctttattatctgcgacgtttatttttatttaagagagccacctgcaagttgttattccaccagagagtgaatcgcaaagcaggtcatcatttcatctgtatatctgtatgccaaatggcattccccctcctttttcgccgatattttgttgtgaacggcggagtttcgcttaaaaaagcaccagtagtggtttcgcagctatatggtgtataaaaaatgttctcatacagatgttttgtgaatgtgtgggttgacattcatatgaaaaaaatcataattccatcatgtttgtgtggggtcttttctgtatattacgcatcgcactcaagcctgacagaaaatatgttgtaaggctcatatcaaaaaccgccattagctcatcaggaagagcagacgacaaccaggattgttgtatggtacggggttcgaggcctcgatggcggtccaacttttcaaaacttttctgaatcagatccccttattatcatccctgcaaagtggaacattgccattgtttggctattcaagacgggtcagaccaatgaaaaagcccacacaggggagagtggctgaaatgggaagctaaagactcaagtaaacttatcggaaataaggaccacgcattacgggggctatcatcgccgatggttgggattcggcaaatcaggttgattacgtagagagtaaattatctgctcaccgctgcgtcaccccttcgtaaatcaggcgtagcgcgaatacaccaataattgcaccaataacccaactggcaacgcgttgcatacgcccataagcacgacgcactgcgggcaaagaaaacgcctgactaagaaagactcgccagataattgatgcgagcacaatccccgcccaggccattaatcgtgcccatgttggtgtttcggcatgtaatgttactgagaaaatactgataaaaaataaaacggtttgcgggttagagagatcggtaattaatccacggcggaaaaagacataccagggggcgctaatcggttgttgtagtgtgctcatttgcggtgttgagtggcggcgcatgctactacaccacgcaaaccataagagataagcgccgccgacgattctgataagcgaaaaaatctccccacactgcgtaattagcgttgcaagaccaaacaaacccaacccggaataaaatgcatcgcccagcgccacgcccagcccggtcaacacccctgcgcgtcgaccggaagccaggctggtttgtactaccacaaagagattggctcccggattaaaaaaagtaatcacgaacaatcctacggtcaggtaaacggcgtgcaaaggatccatagtgatttcatccataaataagtgaagtaacttcatcatatttctaccaaaaataatcgggtgcgagagagatcacaaagtgtcttatttccggttactggcgtttatgccctgactgaactaattattaatcaacccaataatgtgggtgggtgatagtgtgataacaactctggagccgtaatatgaaaataatctctaaaatgttagtcggtgcgttagcgtttgccgttaccaatgtctatgccgcagaattaatgaccaaagcggaatttgaaaaggttgcatcgcaatatgaaaaaataggtgatatttcaaccagtaatgaaatgtcgaccgcagatgcgaaagaagatttgatcaaaaaagccgatgaaaaaggggctgatgtgttggtactgacctctggtcaaactgacaataagatccacggcacggcaaatatttataagaagaagtaattctgaatcctatgtaaacatccccgatgcgtaagtttatcggtgatcatcatctatcgaaatttatgccggataaagcgttcgcgctgcattcggcagttcagcttttcagccgccgccagaacgtcgtccggctgatacctaaataattcgccgctgctgtcttatcgccattaaatttctccagtgcctgttgtgctgtcagcaagcctggaatgggagtcttcgccgactcgcgcgccagttccggcagtagcagctgcaaaaattgcggcgttaaatccggcgtcggttccacacttaaaaataacgccagtcgttccatcatattgcgcagttcacgaatattgcccggccagtcgtagagcaataatacaatctgacaggtctctaatccctgacgtaatgcggcagaaaaagggacagagagtgccgccagagacattttcaaaaagctttccgccagcggcagaatatccgccacccgctcgcgtagcggcggcagttgcaggcgtaaaatactcagccgataaaacaggtcacggcgaaactgcccttgctgcatatcttcttccagattgcagtgagtggcgctaatgacccgcacatctaccggaacaggctgatgcccgccgacgcgggtgacctctttttcttccagcacccgtaacaggcgagtctgcaacggcagcggcatttcgccaatctcatccagaaacagcgtaccgccgtgggcaatttcgaacagcccggcgcgacctccgcgtcgcgagccggtgaacgccccttcctcatagccaaacagctctgcttccagcagcgattcggcaatcgccccgcagttgacggcaacaaacggatgtgactttttgccctgtcgcacatcgtggcgggcaaaatattctcgatgaatcgcctgggccgccagctctttgcccgtccccgtttccccctcaatcaacaccgccgcactggagcgggcatacagcaaaatagtctgccgcacctgttccatctgtggtgattgaccgagcatatcgcccagcacgtaacgagtacgcagggcgttgcgggtggcatcgtgagtgttatggcgtaacgacatgcgcgtcatatccagcgcatcgctaaatgcctggcgcacggtggcggcagaatagataaaaattccggtcattccggcttcttctgccagatcggtaatcagccccgcgccgaccaccgcttcggtgccgttggcttttagctcgttaatctgcccgcgtgcgtcttcttcggtaatgtagctacgttggtcgaggcgcaaattaaaggttttttgaaacgctaccagtgccggaatggtttcctgataggtgacaacgccgatagaagaggtgagttttccggcttttgccagcgcctgtaacacatcgtagccactcggttttatcagaatcaccggtaccgacaggcggcttttcaggtacgcaccgttagagccagcggcaatgatggcgtcgcagcgttcgctggccagttttttgcggatgtaggccaccgctttttcaaagccaagctgaataggggtgatgttcgccagatgatcaaactcgaggctgatatcgcgaaacagctcgaacagccgcgttacagataccgtccagataaccggtttgtcgtcattcagccgtggtggatgtgccatagcgcaccgcaaagttaagaaaccgaatattgggtttagtcttgtttcataattgttgcaatgaaacgcagtgaaacattgcctgaaacgttaactgaaacgcatatttgcggattacttcatgactttatctttaactcattgaaattaaatgtttaattttattaaggcaattgtggcacactcattgctttgtctttatcaacgcaaataacaagttgataacaaaggatgggctatgtctctacactctccaggtaaagcgtttcgcgctgcacttagcaaagaaaccccgttgcaaattgttggcaccatcaacgctaaccatgcgctgctggcgcagcgtgccggatatcaggcgatttatctctccggcggtggcgtggcggcaggatcgctggggctgcccgatctcggtatttctactcttgatgacgtgctgacagatattcgccgtatcaccgacgtttgttcgctgccgctgctggtggatgcggatatcggttttggttcttcagcctttaacgtggcgcgtacggtgaaatcaatgattaaagccggtgcggcaggattgcatattgaagatcaggttggtgcgaaacgctgcggtcatcgtccgaataaagcgatcgtctcgaaagaagagatggtggatcggatccgcgcggcggtggatgcgaaaaccgatcctgattttgtgatcatggcgcgcaccgatgcgctggcggtagaggggctggatgcggcgatcgagcgtgcgcaggcctatgttgaagcgggtgccgaaatgctgttcccggaggcgattaccgaactcgccatgtatcgccagtttgccgatgcggtgcaggtgccgatcctctccaacattaccgaatttggcgcaacaccgctgtttaccaccgacgaattacgcagcgcccatgtcgcaatggcgctctacccgctttcagcgtttcgcgccatgaaccgcgccgctgaacatgtctataacatcctgcgtcaggaaggcacacagaaaagcgtcatcgacaccatgcagacccgcaacgagctgtacgaaagcatcaactactaccagtacgaagagaagctcgacgacctgtttgcccgtggtcaggtgaaataaaaacgcccgttggttgtattcgacaaccgatgcctgatgcgccgctgacgcgacttatcaggcctacgaggtgaactgaactgtaggtcggataagacgcatagcgtcgcatccgacaacaatctcgaccctacaaatgataacaatgacgaggacaatatgagcgacacaacgatcctgcaaaacagtacccatgtcattaaaccgaaaaaatcggtggcactttccggcgttccggcgggcaatacggcgctctgcaccgtgggtaaaagcggcaacgacctgcattaccgtggctacgatattcttgatctggcggaacattgtgaatttgaagaagtggcgcacctgctgatccacggcaaactgccaacccgtgacgaactcgccgcctacaaaacgaaactgaaagccctgcgtggtttaccggctaacgtgcgtaccgtgctggaagccttaccggcggcgtcacacccgatggatgttatgcgcaccggcgtttccgcgctcggctgcacgctgccagaaaaagaggggcacaccgtttctggtgcgcgggatattgccgacaaactgctggcgtcacttagttcgattcttctctactggtatcactacagccacaacggcgaacgcatccagccggaaactgatgacgactctatcggcggtcacttcctgcatctgctgcacggcgaaaagccgtcgcaaagctgggaaaaggcgatgcatatctcgctggtgctgtacgccgaacacgagtttaacgcttccacctttaccagccgggtgattgcgggcactggctctgatatgtattccgccattattggcgcgattggcgcactgcgcgggccgaaacacggcggggcgaatgaagtgtcgctggagatccagcaacgctacgaaacgccgggcgaagccgaagccgatatccgcaagcgggtggaaaacaaagaagtggtcattggttttgggcatccggtttataccatcgccgacccgcgtcatcaggtgatcaaacgtgtggcgaagcagctctcgcaggaaggcggctcgctgaagatgtacaacatcgccgatcgcctggaaacggtgatgtgggagagcaaaaagatgttccccaatctcgactggttctccgctgtttcctacaacatgatgggtgttcccaccgagatgttcacaccactgtttgttatcgcccgcgtcactggctgggcggcgcacattatcgaacaacgtcaggacaacaaaattatccgtccttccgccaattatgttggaccggaagaccgccagtttgtcgcgctggataagcgccagtaaacctctacgaataacaataaggaaacgtacccaatgtcagctcaaatcaacaacatccgcccggaatttgatcgtgaaatcgttgatatcgtcgattacgtgatgaactacgaaatcagctccagagtagcctacgacaccgctcattactgcctgcttgacacgctcggctgcggtctggaagctctcgaatatccggcctgtaaaaaactgctggggccaattgtccccggcaccgtcgtacccaacggcgtgcgcgttcccggaactcagtttcagctcgaccccgtccaggcggcatttaacattggcgcgatgatccgttggctcgatttcaacgatacctggctggcggcggagtgggggcatccttccgacaacctcggcggcattctggcaacggcggactggctttcgcgcaacgcgatcgccagcggcaaagcgccgttgaccatgaaacaggtgctgaccggaatgatcaaagcccatgaaattcagggctgcatcgcgctggaaaactcctttaaccgcgttggtctcgaccacgttctgttagtgaaagtggcttccaccgccgtggtcgccgaaatgctcggcctgacccgcgaggaaattctcaacgccgtttcgctggcatgggtagacggacagtcgctgcgcacttatcgtcatgcaccgaacaccggtacgcgtaaatcctgggcggcgggcgatgctacatcccgcgcggtacgtctggcgctgatggcgaaaacgggcgaaatgggttacccgtcagccctgaccgcgccggtgtggggtttctacgacgtctcctttaaaggtgagtcattccgcttccagcgtccgtacggttcctacgtcatggaaaatgtgctgttcaaaatctccttcccggcggagttccactcccagacggcagttgaagcggcgatgacgctctatgaacagatgcaggcagcaggcaaaacggcggcagatatcgaaaaagtgaccattcgcacccacgaagcctgtattcgcatcatcgacaaaaaagggccgctcaataacccggcagaccgcgaccactgcattcagtacatggtggcgatcccgctgctgttcggacgcttaacggcggcagattacgaggacaacgttgcgcaagataaacgcatcgacgccctgcgcgagaagatcaattgctttgaagatccggcgtttaccgctgactaccacgacccggaaaaacgcgccatcgccaatgccataacccttgagttcaccgacggcacacgatttgaagaagtggtggtggagtacccaattggtcatgctcgccgccgtcaggatggcattccgaagctggtcgataaattcaaaatcaatctcgcgcgccagttcccgactcgccagcagcagcgcattctggaggtttctctcgacagaactcgcctggaacagatgccggtcaatgagtatctcgacctgtacgtcatttaagtaaacggcggtaaggcgtaagttcaacaggagagcattatgtcttttagcgaattttatcagcgttcgattaacgaaccggagaagttctgggccgagcaggcccggcgtattgactggcagacgccctttacgcaaacgctcgaccacagcaacccgccgtttgcccgttggttttgtgaaggccgaaccaacttgtgtcacaacgctatcgaccgctggctggagaaacagccagaggcgctggcattgattgccgtctcttcggaaacagaggaagagcgtacctttaccttccgccagttacatgacgaagtgaatgcggtggcgtcaatgctgcgctcactgggcgtgcagcgtggcgatcgggtgctggtgtatatgccgatgattgccgaagcgcatattaccctgctggcctgcgcgcgcattggtgctattcactcggtggtgtttgggggatttgcttcgcacagcgtggcaacgcgaattgatgacgctaaaccggtgctgattgtctcggctgatgccggggcgcgcggcggtaaaatcattccgtataaaaaattgctcgacgatgcgataagtcaggcacagcatcagccgcgtcacgttttactggtggatcgcgggctggcgaaaatggcgcgcgttagcgggcgggatgtcgatttcgcgtcgttgcgccatcaacacatcggcgcgcgggtgccggtggcatggctggaatccaacgaaacctcctgcattctctacacctccggcacgaccggcaaacctaaaggtgtgcagcgtgatgtcggcggatatgcggtggcgctggcgacctcgatggacaccatttttggcggcaaagcgggcggcgtgttcttttgtgcttcggatatcggctgggtggtagggcattcgtatatcgtttacgcgccgctgctggcggggatggcgactatcgtttacgaaggattgccgacctggccggactgcggcgtgtggtggaaaattgtcgagaaatatcaggttagccgcatgttctcagcgccgaccgccattcgcgtgctgaaaaaattccctaccgctgaaattcgcaaacacgatctttcgtcgctggaagtgctctatctggctggagaaccgctggacgagccgaccgccagttgggtgagcaatacgctggatgtgccggtcatcgacaactactggcagaccgaatccggctggccgattatggcgattgctcgcggtctggatgacagaccgacgcgtctgggaagccccggcgtgccgatgtatggctataacgtgcagttgctcaatgaagtcaccggcgaaccgtgtggcgtcaatgagaaagggatgctggtagtggaggggccattgccgccaggctgtattcaaaccatctggggcgacgacgaccgctttgtgaagacgtactggtcgctgttttcccgtccggtgtacgccacttttgactggggcatccgcgatgctgacggttatcactttattctcgggcgcactgacgatgtgattaacgttgccggacatcggctgggtacgcgtgagattgaagagagtatctccagtcatccgggcgttgccgaagtggcggtggttggggtgaaagatgcgctgaaagggcaggtggcggtggcgtttgtcattccgaaagagagcgacagtctggaagaccgtgaggtggcgcactcgcaagagaaggcgattatggcgctggtggacagccagattggcaactttggccgcccggcgcacgtctggtttgtctcgcaattgccaaaaacgcgatccggaaaaatgctgcgccgcacgatccaggcgatttgcgaaggacgcgatcctggggatctgacgaccattgatgatccggcgtcgttggatcagatccgccaggcgatggaagagtaggtcggataaggcgctcgcgccgcatccgacaccgtgcgcagatgcctgatgcgacgctgacgcgtcttatcatgcctacaggcctgaaccgtaggtcggataaggcgctcgcgccgcatccgacaccatgcgcagatgcctgatgcgacgctgacgcgtcttatcatgcctacccactgtttttacacagataagtttcccccgcctttttgcactcattcatataaaaaatatatccccctacgaaaacgattgctttttatcttcagatgaatagaatgcggcggattttttgggtttcaaacagcaaaaagggggaatttcgtgtcgcaagataacaactttagccaggggccagtcccgcagtcggcgcggaaaggggtattggcattgacgttcgtcatgctgggattaaccttcttttccgccagtatgtggaccggcggcactctcggaaccggtcttagctatcatgatttcttcctcgcagttctcatcggtaatcttctcctcggtatttacacttcatttcttggttacattggcgcaaaaaccggcctgaccacccatcttcttgctcgcttctcgtttggtgttaaaggctcatggttgccttcactgctgctgggcggcacccaggttggctggtttggcgttggcgtggcgatgtttgctattccggtgggcaaggcaaccgggctggatattaatttgttgattgccgtctccggtttactgatgaccgtcaccgtcttctttggcatttcggcgctgacagttctttcggtgattgcggttccggctatcgcctgtcttggcggttattccgtgtggttggccgttaacggcatgggcggcctggacgcattaaaagcggtcgttcccgcacaaccgttagatttcaatgtcgcgctggcgctggttgtggggtcatttatcagtgcgggcacgctcaccgctgactttgtccggtttggtcgtaatgccaaactggcggtgctggtggcgatggtggcctttttcctcggcaactcgttgatgtttattttcggtgcagcgggcgcggcggcactggggatggcggatatctctgatgtgatgattgctcagggccttctgctgcctgcgattgtggtgctggggctgaatatctggaccaccaacgataacgcgctctatgcgtcgggtttaggtttcgccaacattaccggtatgtcgagcaaaaccctttcggtgattaacggtattatcggtacggtctgcgcattatggctgtataacaattttgtcggctggttgaccttcctttcggcagctattcctccggtgggcggcgtgatcatcgctgattatctgatgaaccgtcgccgctatgagcactttgcgaccacgcgtatgatgagtgtcaattgggtggcgattctggcggtcgcgctggggattgccgcaggccactggttaccgggaattgttccggtcaacgcggtattaggtggcgcgctgagctatctgatccttaacccgattttgaatcgtaaaacgacagcagcaatgacgcatgtggaggctaacagtgtcgaataacgctttacaaacaattattaacgcccggttacccggcaaagaggggctgtggcagattcatcttcacgacggaaaaatcagcgccattgatacgcaatctggtgtgatgcccgtaactgaaaacagcctggatgccgaacaaggtttagttttaccgccgtttgtggagccgcatattcacctggacaccacgcaaaccgccggacaaccgaactggaatcagtccggcacgctgtttgaaggcattgaacgctgggccgagcgcaaagcgttattaacccatgacgatgtgaaacaacgcgcctggcaaacgctgaaatggcagattgccaacggcattcagcatgtgcgtacccatgtcgatgtctccgacgcaacgctgactgcgttgaaagcgatgctggaagtgaaacaggaagttgcgccgtggattgatctgcaaatcgtcgccttcccgcaggaagggattttgtcgtatcccaacggtgaagcgttgctggaagaggcgttacgcttaggggcagacgttgttggggcgattccgcattttgaatttacccgtgaatatggcgtggagtcgctgcataaaaccttcgccctggcgcaaaaatacgaccgtctcatcgatgttcactgtgacgagattgatgatgagcaatcacgctttgtcgaaaccgttgctgccctggcgcaccgtgaaggcatgggcgcgcgagtcaccgccagccatactacggcaatgcactcctataacggggcgtatacttcgcgcctgtttcgtttgctgaaaatgtccggtattaactttgtcgccaacccgttggtcaatattcatctgcaaggacgtttcgatacgtatccaaaacgtcgcggcatcacgcgcgttaaagagatgctggagtccggcattaacgtctgctttggtcacgatgatgtcttcgatccgtggtatccgctgggaacggcgaatatgctacaagtgctgcatatggggctgcatgtttgccagctgatgggctacgggcagattaacgacggcctgaatttaatcacccaccacagcgccaggacgttgaatttgcaggattacggcattgccgccggaaacagcgccaacctgattatcctgccggctgaaaatgggtttgatgcgttgcgccgtcaggttccggtacgttattcggtacgtggcggtaaggtgatggccagcacacaaccggcacaaaccaccgtatatctggagcagccagaagccatcgattacaaacggtaatcggctgggctaccgcgagcgtagtttatgccggatgcggcgtgaacaccttatccggcctacgtagatcactgaaattgtaggcctgataagcggagcgcatcaggtaattttgcttatttaaactgaagactcaactttaaaatctttgaaataatattgcttatcccggtcgtttatttcgcgaataacccgacaaggaacgccagcagccacgacgtttggtggaatgtcttttgtgacgacactacccgcgccaataacagaattatccccgatggtgacgcctggattaataaccacatgacttccgatccagacgttattgccaatcgttatcggaaaagagtacatctctccgttttttctcaattcatggtgtaccgggtgtcccgtaacggaaagagtaacgttgggtgcaatcagtacgttatcaccgatcgttaccgtgtagtcgtcgacaatggttaaattgaaatttgcataaaaattgcggcctatatggatgttggaaccgtaagagaaatagacggggggttctacccaggcgttttcccctaccgtggcaaacatttctttaatcagactttcccttttttcaaattctgatggatgcgagtgattaaactcatacattaacgtttttccacgaagtcttttttcaggtaagccttcgcacatatcggtaaatagcttgcctgcttttattctttctgtcatcgacatgttcattgcgatcattccgccctgatatgttggtcggataaggcgctcgcgccgcatccgacattgattgcttaagcgacttcattcacctgacgacgcagtagagaaagcgggccggggccgctaagcgtgaacacggaaattaaggtgaagcccagcgccaccagacccagcaccagataagcgccctggaaaccgatgctttcatacatattgcccgccagtacagacataaaaatcatcgccagttgcttaaagaagcagaaacagaccagataaatcgtcgctgaaaaacgcacttcaaactggctggtaatatatttaaagcagcccaccagcaggaacggtacttcaaacatatgcagcgttttcagaataactacttccagcgctgaggtggcgaacgatgagccaataatacgtacagacataatagtgccagccagcagcagggcatttttcccaccgatgcgattaatgatcagtggcgcaaagaacataatcgaggcgttaagtaattcgcccattgtcgtgacgtagccaaatacccgcgtaccctgttcaccggtagcaaagaacgaagtaaagaaattagcaaactgttggtcaaaaacatcgtaggtgcaggaaacgccaataacatacagtgacaaaaaccacagttttggctgtctgaacagttccagcgccagcttaaggctaaatgccgaatggttggcacctaccgcattggcaaccgtggctgaagagggcgcatccgttttggcgaaaaagagtaaaacggcgaggatgagtgcacagccagaacccagccagaaaacaaactgattattgatggtgaacatgatgccgacaatcgaggcacacagcgcccagccaacacagccaaacatccgcgcgcgaccaaattcgaaattactgcgacggctgactttctcgataaatgcctctactgctggcgcaccggcgttaaaacaaaagccaagataaataccaccaacaatcgatcctactaaaatgttgtattgtaacagtggtccgaagataaaaataaagaacggcgcaaacatcactaacatgccggtaataatccacagcaggtatttgcgcagcccgagtttgtcagaaagcagaccaaacagcggttggaataatagcgagaacagagaaatagcggcaaaaataatacccgtatcacttttgctgatatggttgatgtcatgtagccaaatcgggaaaaacgggaagtaggcccccatgataaaaaagtaaaagaaaaagaataaaccgaacatccaaaagtttgtgttttttaaatagtacataatggatttccttacgcgaaatacgggcagacatagcctgcccggttattattatttttgacaccagaccaactggtaatggtagcgaccggcgctcagctggaattccgccgatactgacgggctccaggagtcgtcgccaccaatccccatatggaaaccgtcgatattcagccatgtgccttcttccgcgtgcagcagatggcgatggctggtttccatcagttgttgttggctgtagcggctgatgttgaactggaagtcgccgcgccactggtgtgggccataattcaattcgcgcgtcccgcagcgcagaccgttttcgctcgggaagacgtacggggtatacatgtctgacaatggcagatcccagcggtcaaaacaggctgcagtaaggcggtcgggatagttttcttgcggccccaggccgagccagtttacccgctctgagacctgcgccagctggcaggtcaggccaatccgcgccggatgcggtgtatcgcttgccaccgcaacatccacattgatgaccatctcaccgtgcccatcaatccggtaggttttccggctgataaataaggttttcccctgatgctgccacgcgtgggcggttgtaatcagcaccgcgtcggcaagtgtatctgccgtgcactgcaacaacgccgcttcggcctggtaatggcccgccgccttccagcgttcgacccaggcgttagggtcaatgcgggtcgcttcacttacgccaatgtcgttatccagcggcgcacgggtgaactgatcgcgcagcggggtcagcagttgtttttcatcgccaatccacatctgtgaaagaaagcctgactggcggttaaattgccaacgcttattacccagctcgatgcaaaaatccgttccgctggtggtcagttgagggatggcgtgggacgcggaggggagtgtcacgctgaggttttccgccagacgccattgctgccaggcgctgatgtgtccggcttctgaccatgcggtcgcgtttggttgcactacgcgtaccgttagccagagttgtccggcgctctccggctgcggcagttcaggcagttcaatcaactgcttaccttgcgggccaacatccagaggcacttcaccgcttgccagcggcttgccatccagtgccaccatccagtgcaggaactcgttatcgctatgacggaacaggtattcgctggtcacttcgatggttcgcccggataaacggaactggaaatactgctgttggtgttttgcttccgtcagcgccggatgcggcgtgcggtcggcaaagaccagaccgttcatacagaactggcgatcgttcggcgtatcgccaaaatcaccgccgtaagccgaccacgggttgccgttttcatcatatttaatcagcgactgatccacccagtcccagacgaagccgccctgtaaacgggggtactgacgaaacgcctgccagtatttagcgaagccgccaagactgttacccatcgcgtgggcatattcgcaaaggatcagcgggcgcatttctccaggcagcgaaagccattttttgatggaccatttcggcaccgccgggaagggctggtcttcatccacgcgcgcgtacatcgggcaaataatatcggtggccgtggtgtcggctccgccgccttcatactgtaccgggcgggaaggatcgacagatttgatccagcgatacagcgcgtcgtgattagcgccgtggcctgattcattccccagcgaccagatgatcacactcgggtgattacgatcgcgctgcaccatccgcgttacgcgttcgctcatcgcgggtagccagcgcggatcatcggtcagacgattcattggcaccatgccgtgggtttcaatattggcttcatccaccacatacaggccgtagcggtcgcacagcgtgtaccacagcggatggttcggataatgcgaacagcgcacggcgttaaagttgttctgcttcatcagcaggatatcctgcaccatcgtctgctcatccatgacctgaccatgcagaggatgatgctcgtgacggttaacgccgcgaatcagcaacggcttgccgttcagcagcagcagaccattttcaatccgcacctcgcggaaaccgacgtcgcaggcttctgcttcaatcagcgtgccgtcggcggtgtgcagttcaaccactgcacgatagagattcgggatttcggcgctccacagttccggattttcaacgttcaggcgtagtgtgacgcgatcggcataaccgccacgctcatcgataatttcaccgccgaaaggcgcggtgccgctggcgacctgcgtttcaccctgccacaaagaaaccgtcacccgcagttcatcgcgcagctcgccgtacatctgaacttctgcctccagtaccgcgcggctgaaatcatcattaaagagagtggtaacttggaaatcgctgatttgcgtggtcggtttatgcagcaacgagacgtcacggaaaatgccgctcatccgccacatatcctgatcttccagataactgccgtcactccagcgcagcaccatcaccgcgaggcggttttctccggcgcgtaaaaatgcgctcaggtcaaattcagacggcaaacggctgtcctggccgtaaccgacccagcgcccgttgcaccacagatgaaacgccgagttaacgccatcaaaaataattcgcgtctggccttcctgtagccagctttcatcaatattaaatgtgagcgagtaacaacctgtcggattctccgcgggaacaaacggcggattgaccgtaatgggataggtcacgttggtgtagataggcgcatcgtaaccgtgcatctgccagtttgaggggacgacgacagtatcggcgtcaggaagatcgcactccagccagctttccggcaccgcttctggtgccggaaaccaggcaaagcgccattcgccattcaggctgcgcaactgttgggaagggcgatcggtgcgggcctcttcgctattacgccagctggcgaaagggggatgtgccgcaaggcgattaagttgggtaacgccagggttttcccagtcacgacgttgtaatacgacggccagagaatccgtaatcatagtcatagctgtatcctgtgtgaaattgttatccgctcataatttcacacaacatacgagccggacacatagagtgtaaagactggggtgcctaatgagtgagctgactcacattaattgtgttgcgctcactgcccgctttccagtcgggaaacttgtcgtgccagctgcattaatgaatcggccaacgcgcggggagaggcggtttgcgtattgggcggaagggtggtttttcttttcaccagtgagacgggcaacagctgattgcccttcaccgcctggccctgagagagttgcagcaagcggtccacgctggtttgccccagcaggcgaaaatcctgtttgatggtggttaacggcgggatataacacgagctgtcttcggtatcgtcgtatcccactaccgagatatccgcaccaacgcgcagcccggactcggtaatggcgcgcattgcgcccagtgccatctgatcgttggcaaccagcatcgcagtgggaacgatgccctcatttagcatttgcatggtttgttgaaaaccggacatggcactccagtcgccttcccgttctgttatcggctgaatttgattgcgtgtgagatatttatgccagcccgccagacgcagacgcgccgagacagaacttaatgggcctgctaacagcgcgatttgctggtgacccaatgcgaccaggtgctccacgcccagtcgcgtaccgtcttcatgggagaaaataatactgttgatgggagtctggtcagagacatcaagaaataacgccggaacattagcgcaggcagcttccacagcaatggcatcctggtcatccagcggatagttaatgatcagtccactgacgcgttgcgcgagaagattgtgcaccgccgctttacaggcttcgacgccgcttcgttcaaccatcgacaccaccacgctggcacccaattgatcggcgcgagatttaatcgccgcgacaatttgcgacggcgcgtgcagggccagactggaggtggcaacgccaatcagcaacgactgtttgcccgccagttgttgtgccacgcggttgggaatgtaattcagctccgccatcgccgcttccactttttcccgcgttttcgcagaaacgtggcaggcctggttcaccacgcgggaaacggtctgataagagacaccggcatactctgcgacatcgtatagcgttactggtttcacattcaccaccctgaattgactctcttccgggcgctatcatgccataccgcgaaaggttttgcgccattcggcggggctgacgccgaagtgagatttaaaatgctgacgccaggtcacaggtgagagaaaacccacgccaatacacctacggcgtttacaggtatactcgctaaaaattattcagtgggtttggaaacaaagatggcaaaacttaccttacaagagcagttgctcaaagcgggactagtcaccagcaaaaaagcggcgaaggtcgagagaacagcgaaaaaatcgcgtgttcaggcgcgtgaagctcgggcggcggtagaagaaaataaaaaggcacagcttgagcgtgataaacagcttagcgagcagcaaaaacaagcggcgttggcgaaagaatataaagcccaggtgaagcagctcattgaaatgaaccgaattatcattgccaatggcgatattggttttaacttcactgacggcaatctgattaagaagatttttgttgataagctcacgcaaacgcagttgattaatggtcgtctggcgattgctcgcttgttggtcgataacaatagcgaaggtgaatacgccattattcccgccagcgttgccgataaaattgctcagcgtgatgccagcagtattgtgttgcacagcgcgctcagcgccgaagagcaggatgaagacgatccgtatgccgacttcaaagtgcctgatgatttgatgtggtaaacatagataaatcgtgtgcagatgcctgatgcgacgctttgcgagtcttatcatgcctacggtttatgggcgaagtgtaggccggataaggcgttcacgccgcatccggcagccgtgcgcagatgcctgatgcgacgcttttcgcgtcttatcaggcctacggcttacgggtgaaatgtaggccggataaggcgtttacgccgcatccggcatgcgtgcgcggatgctcaacgcatattcagtttattggcgtggtacgcaatatgctcgccaataaaactggagacaaaataatagctgtgatcataaccctcgtgataacggattaacgtcttgatattcatctcctggcagatcttttcaagatttgaagtccgcagttgttctgcgtaaaaatcatcactcaacccctgatcaaccatgatttccgcaacgcgttgaccttgtgaaataagactcaccgggtcgtaatccaaccaggcatctttattttcaccaagatatgcggcaaaggcttgctgtccccacggtacttgcgatggggagacaatgggcgaaaacgccgagacgctggcatattcatctgggttacgtaacgccagcaccagcgcgcccagcccgcccatagaatgacctgagatagactttctggccgttgctggaaaatgatgcatcactaaattcggcagctcgttgcggatatagtcatacattttgtaatgttcattccacggcgcttgcgtcgcgttcaggtaaaacccggcaccttgcccgagatcgtaacggtcagcatctgcgacatgactgcctcgcggactggtgtccggcgcaacaacaataatgttgtgctcagccgcgtaacgctgcatccccgatttagtaatgaaattctgctcgttgcaggtcaggcctgaaagccagtacaacaccggcaatttttcattctcggcttttggtgggagatagacgccgacattcatttcacatttcagtgattgggaataatgccgatacacattttgccagccgccaaagctggcatgtttttcaatgagttccatcagtcattatctcacggttaatcccccggacggctgcccggggagagtattaagaaccccatctgaactggacggggtaaaccagcgggaaatcagtaacgaattacggttcgaatggatttaccttcatgcatcaggtcgaaggcgtcattaatttcatccaggctcatggtatgcgtgacaaacggttccagatcgatatcacctttcatcgcatcttcaaccatacccggtaactgggaacgacctttcacgccgccaaacgcggaacctttccatacgcgaccggtgaccaactggaatggacgggtggagatttcctgaccagatcctgcgacaccgatgatcaccgattgaccccagccgcggtgcgcactttccagcgccgcacgcatcacgttgacgttaccgatgcattcaaaggtatggtcgataccccatttgttgatatccagcaggacatctttaatcggtttgtcgtagtcattcgggttaatgcagtcggtggcaccgaagcgacgcgccagttcgaatttcttcgggttggtatcgatagcgataatccgtcccgctttcgcctgacgcgcgccctgaaccactgccagaccaatcgcgccaagaccaaacacggcaacagaatcacctggctggactttagctgtgttgtgtaccgcgccaataccggtggtcacgccacagcccagcaggcagacgtgttcatggttcgcttctggattaattttggccagagacacttccgctaccacggtgtattcactgaatgttgagcatcccatgtagtgataaagcggctgcccgttgtaagaaaaacgggtggtgccgtctggcatcaagcctttgccctgcgtttcgcgaaccgcgacacacaggttagttttgccagaacgacagaactcacactcgccgcactctgcggtgtaaagcgggatcacatggtcgccaggtttgacgctggttaccccttcaccgacttcaactacaaccccggccccttcgtgaccgagaaccaccgggaagacaccttccgggtcatcgccggagagggtaaatgcgtcggtatggcaaacaccggtatgggtgactttaatcagcacttcaccttttttcggtggtgcaacgtcaatttcaacgatttccagcggtttaccgggagcaaatgcaacggcagcacgtgatttcatctctcgctcttcctcaatatggtaatagattcagctatttaagataggcacgaaccagttcaatagtgtcgtcaacggattggctgacttcgcggctgtagcagtcatttcggtcaaacgtttcccggatatggctttcaagcacttctgccatcagcccgttagccgcgccccgaacggcagcgatctgttggagtatggcacggcattcggcatcaccctccagcgaccgttccagagcatcaatctgcccccgaatacgacgaactcgagtaaggacctttttcttctcttccggagtactgggcatttcgcacctcatcatctgcatgcaatatactataggggggtatgctatatgtcaatgcatacccccctatagtatataacactggagaataaaatttatccggtgaatgtagtcggaaaacaaagaggaaagggggggggctaatctgcagggaaggccgccccggatagcgggcggcagaaggaatcagaatttccaggtcagatgggctgcaagttgcagaccgttataatcatcggttggggtgtcgtaccacactttacctgccgtcaacccgagattaagttgctcagtcagcggttgaatacgttgcaaactgatgctcttcatgctgccgtagcgtgtttctggcgtccagtcgtaggtgtaagcacctgttccgcggcttagccatagttgcgtgtaaccagtgccgcgcgggtcattcagacgcacggaaatcatattgctgtaactaccacctgcatcgctggagtcatagtgggtatagcgatagctggtgatcaccgggccagtatagagtgatatgccgccttgccaggcatcgacttcgacatcatcgtaatatttagtgtagcgataaccggtcgtgaaaagcgtttttggcaacagggccaggctaatatcctgacgaaaatcctggcaggcaaagaccggcgtattatccgcaaaggcaatactcgttcgggttgtcagccagttattccatttgtaccagactgcaccctggccgcgagtggcattgaaatgttcagtttcataatcacgacgcccctgggaaagattaaaaagcagcgttgcgttttcaactttcgccaccagttcagcatacgctaaattacggttgccatgatcgccagaataatcggtaaaatcgtagcccgcggtaatggaagttaacccggcataaacgggtaatgcgctaaaaattgccgccgctaataacgtccgttttatcattttaatctcctgtacggataagttcttgtcggagtgaataagttccggtaggtaaattacgttctacaatcacgcgcgggccaagttgcgtgttcggggaaataattcgcccaggcaaaataataacttgtacgccaaggcgtgaacgctgcccgatataacaacctaatttatcgcatccggtagcgataattccatctggagttcgaacagacacgggctgttcatccagacgatgattactggttcgtacttgtgcgcccaaatatgcctggtttgcaactaccgagtcggcaataaagcattgcggaccaatcgttgcttccgcttcaataaccgcatttttaatttcggtggcaaaaccaatttttacgccattgctgattattgtgccaggacgaataaacgcataattacctatcaggcagtttgcgccaatcactaccggaccctgaataacggcaccgtggcaaatacgggtattcgcgccgataacaacctcaccggcactttcatcaataatcacctggtctgcaatctgaatatttttctctttaacattaagcttcagaaagtttttcagttcctgtgacagaagggtgggaataagcggttgacgcttccaccagtgcggaatagcgggtgggtttgtcgcgctgaggttcgcgtccagtaaaaaaggcaataagtccataaataatccagatggcataagctaataatacatacacaacggaaagcggtgctaaaggcaccaacaaccagcaacgatgaaaccaggcgctaaatgcaccaataacacaaactacgccgacccagataagcgggaacattgccaacaccacaccatgtggcccggtggtgatgaattcattaaaccaggtagtgagataaatcccaacgccataaagcacaaccaacagcataggaaatatactgaagataccgaagcggctaaataaaagtcttttatgcaggcgcatacagaccgcgtagcccacaatccaacgccgccagcgacgccattcctcacgcgggctgttgcattcctgtgggtatacgatgcagcgattcgcctgccgaatacgatagccgtttgccaccaatgtccaggtgagatcaaggtcttcgactttagtacgatccgagaaaccgaacttacgcaatacatcagtacggaacatcccgcaggcaccgctgatgataaacggtgcgccgcccagaagctgctgtagcgtgcgcttcataacaatcatcggcaactttacggtcgcgcggatgtgtggtaacagacccgcgcctttcaacgcagtagagggaatgccgcctacggcatcagcgccacgctcaatttccgccagcatatagcccattccgtcttgatcgggcggaacataggtgtcggcatcacttaaaaaaacctgatcgcaggtggcgtaattgaggccattcatcagcgcaccacctttaccggtatttttttgcgtgacggcaacaaagcggtcgccccatttgcgtttgacttccgccatgaccgcttcggtattgtccgtggagccgtcgttaacgcaaattacccggcaaaaataagggttacgcagcagattatccagtgactgcgccagacacgggccttcgttataagcaggtataatggcgtcaatacagcctttcttttggctgggcttacgccttaacgtactcagaaaccatagcaatattgctacggccatacatataaagatccaggttttcatgcaatttgctcaaagaatcattttatgaataacaaaaccttcacccagatcgctattgacctgttgcccgcgaaattgagcaactgcacgcagacgctccgggcgcatataatctcgctggctctgacttttatgtttttttaacgcagtcagtttaagagaaaaatattcttctttcacggattcaaaaacctgaggcataaatgaaagccaggtacttggtgtttcatagccgagaatttgcggaatagcgcgacaggcaaccattgaggcttgatagactgcaagatgatcctgatggcggtcagcatcatgcatggtatatacacgtataatttcaacatcagagggaatttgattttttatgatgttttccagggcagaaatcatatcattgagctgtaaatgagcgcgggtgtcagcaaaattaagatgaatagtttggtggcaccctaatatctttagagcgttgcgtgattcttcgtggcgatcgattattccatctacgccagaattaccggtagtcatcaccacggtagcaatataaattcctttttgcgcaaggcgagctagcgatgcgccacagcctaattctatatcgtcaggatgcgcgccaatggcaaggataccctttcttttatttgccgaagaaaggatcgctgaatctaaaaccttatccactttatgacactccattttatttattatactacaagcacaacgacgcccccagagacgtaacctctgacgcagacagatgctaatttttaagtgttaaaaatagctgatagctgaaaaacaaggggctgtcaggtacggggataagagtgtgtaatcttttatgtagttcatatgttaagtgtttgtgtgtttggtttgtatggttattttgttttatatattgtatttaaatgtgatttagtttgtcaattaattgcatattaaaaatatgttctatgcacaaatattgattatatacattatgtgaatacattatgtggttgattgagaatgatacatttatatatgcaatgtgaatataatggtttcattatatgtgttgctgttaataaaataacagacattagaacctgcttgtttatgcattaataaaatgaagtgcagtaatttactgagttatcagagtgggcgtaattgcatatttaatctttcctttgccgcttttttgctaagaataaaatcatctgtacgataacgactaattcttttaatgaatgtttttattcctgaatactgctcccataacaagacgggggagcagacaatcatggcaatttcatcgcgtaacacatttcttgccgcactggcattcatcgcttttcaggcgcaagcggtgaacgtcaccgtggcgtatcaaacctccgccgaaccggcgaaagtggctcaggccgacaacacctttgctaaagaaagcggagcaaccgtggactggcgtaagtttgacagtggagccagcatcgtgcgggcgctggcttcgggcgacgtgcaaatcggcaacctcggttccagcccgttagcggttgcaaccagccaacaggtgccgattgaagtcttcttgctggcgtcaaaactgggtaactccgaagcgctggtggtaaagaaaactatcagtaaaccggaagacttgattggtaaacgcatcgccgtaccgtttatctccaccacccactacagcctgctggcggcgctgaaacactggggtattaaacctgggcaagttgagattgtgaacctgcagccgcccgcgattatcgccgcatggcagcggggagatattgatggtgcttatgtctgggcaccggcggttaacgccctggaaaaagatggcaaggtgctgaccgattctgaacaggtcgggcagtggggcgcgccgacactggacgtctgggtcgtgcggaaagattttgccgagaaacatcctgaggtcgtgaaagcgttcgctaaaagcgccatcgatgctcagcaaccgtacattgctaacccagacgcgtggctgaaacagccggaaaacatcagcaaactggcgcggttaagcggcgtgccggaaggtgacattccggggctggtgaaggggaatacctatctgacgccgcagcagcaaacggcagaactgaccggaccggtgaacaaagcgatcatcgacaccgcgcagtttttgaaagagcagggcaaagtcccggctgtagcgaatgattacagccagtacgttacctcgcgcttcgtgcaataaaaggaggcgcagatgctgcaaatttctcatctttacgccgattatggcggcaaaccggcactggaagatatcaacctgacgctggaaagcggcgagcttctggtagttctggggccgtctggctgcggcaaaactacgttgctgaatttgattgctggttttgtgccttatcagcatggcagcattcaactggcgggtaagggtattcagggaccgggagcagagcgtggcgtagtttttcagaatgaagggttgttaccgtggcgcaatgtacaggacaacgtggcgttcggcctgcaactggcaggtgtagagaaaatgcagcgactggaaatcgcacaccagatggtgaaaaaagtcgggctggaaggcgcagaaaaacgctacatctggcagctttccggtggtcaacgtcagcgggtggggattgcccgcgcgttggcggcaaatccccagctgttattactcgacgaaccgtttggtgcgctggacgccttcacccgcgaccagatacaaaccctgctgctgaaactctggcaggagacgggaaagcaggtgctgttgattacccacgatatagaagaagcggtgtttatggcgactgaactggttctgctttcacccggcccaggccgcgtgctggagcggctgccgctcaacttcgcccgccgctttgttgcgggagagtcgagccgcagcatcaagtccgatccacaattcatcgccatgcgcgaatatgttttaagccgcgtatttgagcaacgggaggcgttctcatgagtgtgctcattaatgaaaaactgcattcgcatcggctgaaatggcgctggccgctctcgcgtcaggtgaccttaagcattggcacgttagcgattttactcactgtatggtgggtagtcgcggcgctgcaactgattagcccgctgtttttgccgccaccgcaacaggtactggcaaaactgctcaccattgccgggccgcagggatttatggacgccacgctgtggcagcatctggcagccagcctgacgcgcattgtgctggcgctactcgcggcggtgttgatcggtattccggtcgggatcgccatggggctaagcccgacggtgcgcggcattctggatccgataatcgagctttatcgtccggtgccgccgctggcttatttgccgctgatggtgatctggtttggtattggcgaaacctcgaagatcttactgatctatctagcgatttttgcgccggtggcgatgtcggcgctggcgggggtgaaaagcgcgcagcaggttcgcattcgtgccgcccagtcgctgggtgccagccgtgcgcaggtgctgtggtttgtcattttgcccggcgcgctgccggaaatcctcaccggattacgcattggtctgggtgtgggctggtctacgctggtggcggcggagctgattgccgcaacgcgcggtttaggatttatggttcagtcagcgggtgaatttctcgcgactgacgtggtgctggcggggatcgcggtgattgcgattatcgcctttcttttagaactgggtctgcgcgcgttacagcgccgcctgacgccctggcatggagaagtacaatgagtgaacgtctgagcattacctcgctggggccgtatattggcgcacaaattacgggggccgacttaacgcgcccgttaagcgataatcagtttgaacagctttaccatgcggtgctgcgccatcatgtggtgtttctgcgcgatcaagctattacgccgcagcagcaacgcgcgctggcccagcgttttggcgagctgcatattcaccctgtttaccctcatgctgaaggggttgacgagatcatcgtcctggatacccataacgataatccgccggataacgacaactggcacaccgatgtgacatttattcaaacgccacccgcaggggcgattctggcggcgaaagagttaccctcgaccggcggcgatacgctctgggccagtggtattgccgcatatgaggcgctctctgttcccttccgccagctgttgagcgggttgcgtgcggagcatgatttccgtaaatcgttcccggaatacaagtaccgcaaaaccgaggctgagcatcaacgctggcgtgaggcggtcgcgaaaaatccaccgttgctacatccggtggtgcgaacgcatccggtgaccggtaaacaggcgctgtttgtgaacgaaggttttaccacacgaattgttgatgtcagcgagaaagagagcgaagccttgttaggttttttgtttgcccatatcactaaaccggagtttcaggtgcgctggcgctggcaaccgaatgatattgcgatttgggataaccgcgtgactcagcactatgccaatgcggattacctgccacagcggcggattatgcatcgggcgacgattcttggggatattccgttttatcgggcggggtaagggggaaatgccgggttggataacccggcataatgatcattaacgcagaatcttcttctcagccaaatccagcgcaaagtagctgaaaatcagatccgcacccgcacgcttaatcgaacctaagctttcgagcacgactttctcttcatctatagcacccgccagcgcggagaacttaatcatcgcgtactcaccgctcacctgatacgcgccaatcggcaattcagtacgttcacgcagctcacgcacgatgtcgaggtatgctccggcaggtttaaccatcaggcagtctgcgccctgggcttcatccagcagcgactcacgaatcgcctcacgacggttcattgggttcatctgatagcttttgcggtcgccttttaatgcgcttccggcagcttcacggaacgggccataaaaggaggaggcgaacttggtcgaatacgacataatcgccgtatctttaaagcccgcagcgtccagcgcctggcgaatcgcctgtacctgaccatccatcgcggcagaaggggcgatgaagtctgcgcctgcagcagctgcaaccacagcttgcttgcctaaattttccagagtcgcgtcgttgtcgacgccatgctcgcacagaacaccgcagtgaccgtgagatgtgtattcacagaagcaggtgtctgacataacgatcatttctggcacggtctgcttgcagatgcgcgacatacgcgccaccagtccatcttcccgccaggcatcgctgccggtttcatcggtatggtgagagatgccgaaagtcatcacggaacgaataccggcgttggcgatgcgttcaatttcgcgtgccagatgtttctctggaatgcgcatcacgcctggcatggcttcaacggctttgtagtcgtcaatttcttcttcaacaaagatcggcaacaccaggtcgttaaggctaagtgttgtctcttcaaacatagcgcgcagcgcaggagatttgcgcaggcgacgagggcgttggattaaatctgtcatggtctgcctgatgtttgtggaatcgaggagcatagtatacctgaagcaggctgggtgtgttttacgaaagttgtcgcgatgttgacaaaaagagaatgaaaaagaggtcaggacatctttgtaatagaaatagcaataatttcatattcactgaaaatatttttaatttttatttatagccatagattattgtttttggggatttggtgacgtttccaaaaagtgaatagcttaaagttcattgcttattgatacattatttgtctgtttttgttgttttatattttcatggtctatgttttaaaattaacgctttcattaacgtattgaaatattgtgtttttgttatttctttctttgtgtgtgttcacgtgctttatatatgtccgcaatcggacttaggggaaagaataattgaaccattcctctataacgccgcataatcgtaaacgcgaaacataatatgttttctatgcattgataattgatggatcaacttattacgtccctgaggagggatgacaaatgcactcctggaaaaagaaacttgtagtatcacaattagcattggcttgcactctggctatcacctctcaggctaatgcagcaaactatgatacctgggggtatcatgacaacaccacgaccgatttagtttggccgtatgacactgacaatgatggaattgccgatgctggcggcatggacccgatgggttcagacggtaactacgtaacttacaatggttttgtttactataacaatgccaatggcgatttcgatactgtctttaaaggcgataccgttaacggtaccatttctacttattacttgaatcatgattacgctagcggttctgttaaccaggtagatatcagcaattcagtaattcatggggcaatcacctctgaactgccatttggttattacagcattactcctgcagaagttaatgctaaaggtgaagttgtaactccacagacctataatggctataatttctataacggaatcactactgaccttgactacaattggtacgatggtgacgtattcactctgaacgtatccaattccaccattgatgatgactatgaagctctttacttcactgacacatatcttgatggtgataaatctaagtcaaccaatgaaacgttctataccgctctgggtgttgcagtaaatcttgatgttgaaagcaatatcaatattactaacaactcccgtgtagctggtattgcgctgtctgaaggcaatacaagcaacacgacttatactagcgaatatcatcagtgggacaacaacattaatgtgtctaactccactgtaacttcagggtcacagactccgctggaagaaagcaatggcttcttcggtaaatctgctgaaccaagtgattacgctggtaatggtggcgaaaatgacgtagctctgtcattctctgacaatgctggctcaaattattccatgaaaaacaatgtaaactttgaccattcaaccctgttgggtgatgtcgagttcacaagccactggaataacgatggcgtattcttctattcaaccggccatgacagcaatggtgacggtgtccttgataccaacggtggttgggtagatgatgctcagaacgttgatgaactgaacattactctgaacaacggtagtaagtgggttggctcagcaaacatgagtgctgaagtaattgctccggcagatatgtatgatgttgcgccgaacagcctgacccctggtgccactatcgaagctaacgattggggtcgtattattgacaacaaggtattccagagcggcgtatttaacgtagcactgaacaatggttcagaatggaataccgttaatagttcagtaattgatacattagctgtaaataatggctctcaggtaaatgttactgattcctctctggtctcagataccattggtttaaccaacggctcctcactgaatattggtgaagatggtttggttgctacagaccacctgactgttgatagctacagtaccgttaatttaaccgaatctactggctggaataactattctaacctgtatgccaataccatcaccgtaactaacggtggtgtactggatgtgaacgttgatcagtttgatactgaagctttccgtactgacaaactggaactgactagcggcaacatcgctgaccacaacggcaatgtagtttctggtgtgttcgatatcaacagcagcgattatgttctgaacgctgacctggtgaacgaccgtacttgggataccgctcaggctaactacggctacggtgttgttgctatgaactctgatggtcatctgactatcaacggtaacggcgacgtagacaacggtactgaactggataacagttctgtagacaacgttgttgcggcaaccggtaactacaaagttcgtatcgacaacgcaactggcgctggcgcaatcgctgattacaaagataaagaaattatctatgtaaacgacgtcaacagcaacgcgaccttctctgctgctaacaaagctgacctgggtgcatacacctatcaggctgagcagcgtggtaacaccgttgttctgcaacagatggagctgaccgactacgctaacatggcgctgagcatcccgtctgcgaacaccaatatctggaacctggaacaagacaccgttggtactcgtctgaccaactctcgtcatggtctggctgataacggcggcgcatgggtaagctacttcggtggtaacttcaacggcgacaacggcaccatcaactatgatcaggatgttaacggcatcatggtcggtgttgataccaaaattgacggtaacaacgctaagtggatcgtcggtgcggctgcaggcttcgctaaaggtgatatgaatgaccgttctggtcaggtggatcaagacagccagactgcctacatctactcttctgctcacttcgcgaacaacgtctttgttgacggtagcttgagctactctcacttcaacaacgacctgtctgcaaccatgagcaacggtacttacgttgacggcagcaccaactccgacgcttggggctttggtttgaaagccggttacgacttcaaactgggtgatgcaggttacgtgactccttacggcagcgtttctggtctgttccagtctggtgatgattaccagctgagcaacgacatgaaagttgatggtcagtcttacgacagcatgcgttatgaactgggtgtagatgcaggttataccttcacctacagcgaagaccaggctctgactccgtacttcaaactggcttacgtctacgacgactctaacaacgataacgatgtgaacggtgattccatcgataacggtactgaagggtctgcggtacgtgttggtctgggtactcagttcagcttcaccaagaacttcagcgcctataccgatgctaactacctcggtggtggtgacgtagatcaagactggtccgcgaatgtgggtgttaaatatacctggtaatattcttcactccgaagaaataggtaatttaatctaaataatgcccgtcaaggatttgacgggcattactgcaaaggacgcgcaaatgttatctgtagttaaacctcttcaggaatttggtaagctcgataaatgtttgtccagatacggtacgcgcttcgagtttaataatgaaaagcaagttatattttccagtaatgtcaatagcgaagatactttcgttattttagagggcgttatctctttgcgtagagaagaaaacgtacttatcggtattacacaggctccttatattatggggctggctgatggtttaatgaaaaacgatataccatacaaattaatatcagaaggaaactgtacgggatatcatttgccagccaaacaaaccattactcttattgaacaaaatcaactctggcgagacgctttttactggttagcctggcaaaatagaattctggaattacgcgacgttcagctcattgggcataattcctacgaacaaatccgcgcgacgttattatcaatgattgactggaatgaagaattgcgatcacgtattggcgtgatgaattatatccatcaacgtacacgtatatcgcgttctgtcgttgcggaagttcttgctgctttgcgtaaaggcggctatatcgaaatgaataaaggcaaactggtcgctatcaaccgtttgccttcagagtattaatcaggatgcggggataaccaacggtttattcccgcttagctcggtcaccaggtcattgatgccatcgctcatatttttaaagcgcgtcaacggcgaacgagtgaccaccacaaacgcgccaatattcttctgcgggatcatcgccatataggtaatgaaaccgccaccaccacctgtcttctgaataatccccggacgaccctctttcggggccatatatacccagcctaaaccaagcgcatccgctttgccggggacatccatgccaatcacttttgtaaactgcgcgcgctgataaatcaacgtctgcatgcgatcagcctggttactgcgctgataaaaatcagatgacaaatactgctgcatccagcgcatcatatcgcctggcgtggaatagacgccgccgctgccaattgccgccagcgtgttattgcacggactggcaccgcgctcagcaaccattaaacggcggcactgatccggtgagggggtgtaggtggtgtctttcatccccaacggacgggtaatctgctcttcaaacaactgggtataaggcttgccggacgcattcgccagtgcatctgccagcagatcgaatgcgaggttggagtacgcggcctggctgcccggcgcggcttttagtttggcagtggaaaggtatttccagcgttgctcgcgcgttggccagacaaataccggacgatgtgccgcgccaccgggctgttcacggggcagggcgctggtatgggttgccagattcaccagcgtaatgggcgtcccattgtaggtcggtacgcgtgcgcctggcggagcatatttacttagcggatcgtttaacttcacggtcccctggtcgagcaatttcaccagcatctcactggtcattaacttggtgagggaagcaatacgtatgacggaatccagctgcgggcgaacgttattaccaggtcgcgtttcgccataactgcgaaagacgcgctggttaccgtcgataacaaccagcgccatccccgtggcaccgctgccgtaaaaaatatgatcggcataacgatcgacaatatcagaggcaaactccggttcagtgatcggctgcgccgcatggacggaggtcaatgacgccgcatacagcacggcagaaaaaagcagactacgtttcaacggtggtgtccatagattgaatgaaggtaactgagcgtatttatactactcattgatggattgcaaagggcgaattagtgcaataatagtgttaaaaacgtaacggcgcgtaaacacgatctttttcctgctcaccaatgcctgcatttgtgatcctgcgcgtgttaatccgcttatgtaaacaatctttggtttgtgaaacccgtcgaaacaattcttatggtcaggctggcgaactaagcgccttgctatgggtcacaatgggcagtttcatttggctgacgctttgtagcggtcatgcggttaatacacagcagttgttaaaacgataagaagttagcaggagtgcatatgtttaagtcttttttcccaaagccgggaacgttttttctctcggcctttgtttgggcattgattgccgttatcttctggcaagccggtgggggtgattgggtggcgcgtatcaccggcgcttccgggcagatcccgattagcgccgcgcgtttctggtcgttggatttcctgattttttacgcttactacattgtttgcgtaggactttttgcattgttctggtttatctatagcccgcaccgttggcaatactggtcaatactcggtactgcgctgattatcttcgtcacctggtttttggtggaagtcggggttgccgtcaacgcctggtatgcgccgttctatgatctgattcaaacggcgctaagttcgccgcataaagtcaccatcgaacaattttaccgcgaagtgggcgtctttctggggattgcgctgatcgcggtggtgatcagtgtgctgaacaacttctttgtcagtcactacgtgttccgctggcgtacggcgatgaacgaatattacatggcgaactggcaacaactgcgtcatatcgaaggggccgcgcagcgtgtgcaggaagacaccatgcgttttgcttcaacgctggagaatatgggcgtcagctttatcaacgctatcatgacgttgatcgccttcctgccggtgctggtaacgctctccgcacatgtgccggagctgccgattgtcgggcacattccgtatggtctggtgattgccgctatcgtctggtcgctgatggggaccggattactggcagtggtagggatcaaactgccggggctggagtttaaaaaccagcgtgtagaggctgcctaccgtaaagagctggtttatggtgaagacgatgccacgcgcgcgacgccgcctacggtacgcgagctttttagcgccgtacggaaaaactatttccgcctctattttcactatatgtatttcaatatcgcccgcattctctatttgcaggtcgataacgttttcggtttgttcttgctgtttccgtcaattgttgccggtacgattacactcggcctgatgacgcagattactaacgtttttggtcaggttcgcggtgctttccagtacctgattaactcatggaccacactggttgagttgatgtctatctacaaacgtctgcgcagctttgaacatgagctggatggtgacaaaattcaggaagtaacccataccttgagctaaaaaggagaagtaatgtcgcgcgtcaatcctctatcttcgctgtcattgttggcggttctggttttagcggggtgtagtagtcaggctccgcaaccgttgaaaaagggcgaaaaagcgatagatgtggcgagcgtcgtgcggcagaagatgcctgcgagcgtgaaagaccgcgatgcctgggcgaaagatctcgccaccacctttgaaagtcaggggctggcaccgacgctggaaaacgtctgctcggtgctggcggtggcgcagcaggagtcaaattatcaggcagatccggccgttccgggcttaagcaagatcgcctggcaagagattgaccgtcgtgctgaacggatgcacattcctgcttttctggtgcataccgcgctaaaaatcaaatcgccaaacggcaaaagctatagcgaacggttagattcggtgcgtacagaaaagcaattgagcgcgatttttgacgatctgatcagcatggtgccaatggggcagacgctgtttggttcgctcaatccggtgcgcaccggtgggccgatgcaggtcagtattgcttttgccgaacagcataccaaagggtatccgtggaaaatggacggtacagtccgtcaggaagtcttcagtcgccgcggcgggttgtggtttggtacttaccatttactgaattatcccgccagctatagcgcgccgatataccgttttgctgattttaacgctggctggtacgccagtcgtaatgccgcgtttcagaacgcggtcagtaaggccagcggcgtgaagctggcactggacggtgatttaattcgttacgacagtaaagagcccgggaaaaccgaactggcaacgcgcaaactggcgggaaaactggggatgagcgacagcgaaattcgccgtcagttagagaaaggggacagcttctcttttgaggagacggcgctgtacaagaaagtttatcaacttgccgaagcgaaaaccggtaaatcactaccccgcgaaatgttgcctggcattcaactggaaagcccgaaaatcacccgcaatctgactacggcctggtttgcgaagcgcgtagacgaacggcgggcgcgttgtatgaaacagtgatcaaacaggaatgtcacgccagataaggcgttttaggcagcatctggcaacgtaaatcttactggcggcgatgtcgccagtgcagccatagcgccactactgcaaaaatgaggcagcctactaaaaacgggatcagcccaaaaatggtgccgacacctaaaccaatttccacccgtgggcgacctgtttcctggacctgcattaaacgctcatagacgccgggcgcatgcactagcaggttcagcaattgcgccccagcccaaaagcaaaacagcacaaacaacgcataggcaatattgccaggcgttgaagatgcattgcgatattttccgctaaacagcgattttgacagggtgaaatcagccataaaaacctccggaagtcatctgcttctcttctggtgtgataccagcggcttatggcaagtctgacaggtcatttcgattgtcaatatcagaatcatggtaaattgatgttgggaatattcccgaagcgtgaatcttcgttgtgagtcacaaaatagcaaccttaagttaaatttattaacaattgcgaaagtgttgtctacaccacagacagttgttacagaatatgcaaggatgttgtttttcgttaacggagctgccatgaatctgcctgtaaaaatccgccgtgactggcactactatgcgttcgccattggccttatattcattcttaatggcgtggtggggttactgggatttgaagcaaaaggttggcagacctatgccgtcggtctggtgacgtgggtgattagtttctggctggcggggttgattattcgtcgtcgcgatgaagaaactgaaaacgcccaataagaatattaccgggcgtttgaatattacattgtggttttcagtgcgttatccgcagcgtgacgctccagcgccagctcaatcaaacgcgtgatcaggtcggtgtaacccagaccgctggcttgccacagcttcggatacatactgatgttggtgaagccaggcagggtgttgatctcgttgatcactacttcgttctctggggttaaaaacacgtctacacgcgccatgcctgcgcatcccaacgtctgataagcctgaacggcaatcgcccggatcttatcgttgatttctggcgcaatggctgctggaactaccactttcgcgccatcttcgtcaatgtacttggtgtcgtaggcatagaaatcgctggtgagtacgatctcgccacaggtgcttgcttgcgggttatcgttgccaagaactgcgcattcgatttcacgacctttgatcccttgctcaacgatcactttatgatcgaactcgaacgccagatcgacggcaattgtgtactgttcttcactggttactttgctgacaccaacagaagagccctgattagccggttttacaaacagcggtaaccccagtttagactccacttcggcaaaactgatgttgtgacgattagcgcgcgtcagggtaataaatggcgcaatgttcagcccggcatcgcgcagcagacgtttggtgacatctttatccatacaggccgctgaagccagaacatcagaacctacaaacggtaaattggcgacccgcagcattccctgcaaggaaccatcttcgcccagcgtaccgtggacaatcgggaaaatgacatccaccgtcggcaacggctgaccgttttgtgcgtcgataagctgatgctcatgtttacctggcacctgcgcaaggctggtcgccgaaggacgcaacgcaatatgggcaggatcgtctgcatttagcagataattgctggcatcgctgacgtgccattgcccttgtttatcaatgcccagcagcacaacatcgaagcgacttttatcaatggcatcgacaatgttttttgccgattgcagagacacttcatgttccgctgatttaccaccaaaaacgattcctacccgcagtttttccatcttaaaaacctatcccgtctaacacaaagtgcatacattaccatgacaaaacgggggattcgcggccttctgacagaatgttgcaatcttctgctgacaaagcgagcaacgtactggtgaagaaagtgcgttatctcaaagatgtgtgcaagatcacaaaaatgatgaacgggaagctaatttattcctggcttaaatgaccatgtggtgagttttttctcttaattataagataacgaagagaatatatttcataacttttatttataataaaggttgataattaaaggcctgtattttatgtgggtaattatttaaataagagaaacgtttcgctggtaatcaaacaaaaaaatatttgcgcaaagtatttcctttgtcataaaaataatacttccagacactatgaagttgtgaaacataatgttaacttctccatactttggataaggaaatacagacatgaaaaatctcattgctgagttgttatttaagcttgcccaaaaagaagaagagtcgaaagaactgtgcgcgcaggtagaagctttggagattatcgtcacggcaatgcttcgcaatatggcgcaaaatgatcaacagcggttgattgatcaggtagagggggcgctgtacgaggtaaagcccgatgccagcattcctgacgacgatacggagctgctgcgcgattacgtaaagaagttattgaggcatcctcgtcagtaaaaagttaatcttttcaacagctgtcataaagttgtcacggccgagacttatagtcgctttgtttttattttttaatgtatttgtacatggagaaaataaagtgaaacaaagcactattgcactggcactcttaccgttactgtttacccctgtgacaaaagcccggacaccagaaatgcctgttctggaaaaccgggctgctcagggcgatattactgcacccggcggtgctcaccgcttaacgggtgatcagaccgccgctctgcgtgattctcttagcgataaacctgcaaaaaatattattttgctgattggcgatgggatgggggactcggaaattactgccgcacgcaattatgccgaaggtgcgggcggcttttttaaaggtatcgatgccttaccgcttaccgggcaatacactcactatgcgctgaataaaaaaaccggcaaaccggactacgtcaccgactcggctgcatcagcaaccgcctggtcaactggtgtcaaaacctataacggcgcgctgggcgtcgatattcacgaaaaagatcacccaacgattctggaaatggcaaaagccgcaggtctggcgaccggtaacgtttctaccgcagagttgcaggatgccacgcccgctgcgctggtggcgcatgtgacctcgcgcaaatgctacggtccgagtgcgaccagtgaaaaatgtccgggtaacgctctggaaaaaggcggaaaaggatcgattaccgaacagctgcttaacgcccgtgccgatgttacgcttggcggcggtgcaaaaacctttgctgaaacggcaaccgccggtgaatggcagggaaaaacgctgcgtgaacaggcacaggcgcgtggttatcagttggtgagcgatactgcctcactgaattcggtgacggaagcgaatcagcaaaaacccctattaggactgtttgctgacggcaatatgccagtgcgctggcaaggaccgaaagcaacgtaccacggtaatatagataagcccgcagtcacctgtacgcctaatccgcaacgtaatgacagtgtaccgaccctggcgcagatgaccgacaaagccattgaattgttgagtaaaaatgagaaaggctttttcctgcaagttgaaggtgcgtcaatcgataaacaggatcacgcagcgaatccttgtgggcaaattggcgagacggtcgatctcgatgaagccgtacaacgggcgctggaattcgctaaaaaggatggtaacacgttggtcatagtcaccgctgatcacgcccatgccagccagatagttgcgccggataccaaagctccgggcctcacccaggcgctaaataccaaagatggcgcagtgatggtgatgagttacgggaactccgaagaggattcacaagaacataccggcagtcagttgcgtattgcagcgtatggcccacatgccgccaatgtcgttggactgaccgaccagaccgatctcttctacaccatgaaagccgccctggggctgaaataaaaccgcgcccggcggtgaattttcgctgtcgggtggtttttttgctgttagcaaccagacttaatggcagatcacgggcgcaaacgctcatggttaaaacatgaagagggatggtgctatgaaaataacattactggttaccttgcttttcggactggtttttttaaccaccgtcggcgctgccgagagaaccttaaccccgcaacaacagcgtatgacctcctgtaatcagcaggcgacggcgcaggcgttgaaaggggatgctcgtaagacctacatgagtgattgcctgaagaacagcaagtctgcgcctggtgaaaaaagtttgacgccacagcagcaaaagatgcgcgaatgtaataatcaagcaacgcaacaatctctgaaaggtgatgatcgtaataagtttatgagcgcctgcctcaagaaagccgcctgatacctgatagtgctaacgggtgagctacgaaaatggctcacccgaaatttcatacttctgcctttagccccgtctctataatttgggaaaattgtttctgaatgttcccaaaaataatgaatgatgaaaactttttcaaaaaagcggcggcgcatggggaggaacctcctttaactcctcaaaacgaacatcagcgatccgggctgcgcttcgcccgtcgcgtcagactaccccgcgcggttggcctggctggcatgttcttaccgattgcttcaacgctggtttcgcacccgccgccgggctggtggtggctggtgttggtcggctgggcgttcgtctggccgcatttagcctggcagatagcgagcagggccgtcgatccgcttagccgggaaatttacaacttaaaaaccgatgcagtattagcgggaatgtgggtaggcgtaatgggcgtaaacgtgctgccttccaccgcgatgttgatgattatgtgtctgaatttgatgggggcaggcggcccccgtctgtttgtcgcgggtctggtgttgatggtggtttcctgccttgtcaccctcgaactgacgggcatcaccgtgtcgttcaatagtgcgccgctggaatggtggctctcccttcccattatcgtcatttatcctctgctgtttggctgggtcagctaccagacggcgactaaactggcggaacataaacgcaggttgcaggtcatgagtacccgcgacggtatgacgggcgtgtataaccgacgtcattgggaaactatgttacgcaatgaatttgataactgtcggcggcataaccgcgatgcgacattactgattatcgatatcgaccatttcaagagcatcaacgatacctggggccatgatgtgggcgatgaagcgattgtggcgcttacccgacagttacaaataaccctgcgcggtagcgatgtgattggtcggtttggcggcgatgagtttgcggtaatcatgtccggtacgccagctgagagcgccattaccgccatgttacgagtgcatgaagggctaaatacattacgtctgccgaatacgccacaggtaactttacggattagtgtgggggttgcgccgctgaacccacaaatgagtcactatcgtgagtggttgaaatcggcagatttggcgctttacaaagcaaagaaagccggacgtaaccgcaccgaagtggcggcctgacgtccggcaaaagtcatcaggatttactgagtttttctgatttttccatacacttcgtcatcgcttcgatcactgcggcacggaagcctttctcttccagtacgcgtaccgcctcaatggtggtgcctcccggtgagcagaccatatctttcagtgcccctggatgttctcccgtttccagcaccatttttgcggaacccattaccgcctgagcggcaaatttatacgcctgggcgcgtggcatcccgcccagcacggcggcgtcggccatcgcttcgataaacataaagacgtaggctggcgaagaaccgctcacaccgaccaccgggtggatcatcggctcggcaattacttccgcttcgccaaagcagcggaaaatattcagcacatcagcggtatcttctggggttaccagcgcgtttggcgttacggaggtcatcccggcattaaccagcgcgggagtgttcggcatggcgcggataattttccggtcatggcccagcgcgcgggcaagctggtcgagtgtgatacctgcagcaatagaaacgaccagagagtctttattcaggctggaggtgatttcgctaagcactttaatcatgatgccaggtttaacggcggcaaaaatgatgtcggcgatttgcgctacttcttgcgccgattctgcggcgttgatgccgaactggtcatgcagggcggcgactttatccggggagggggtatatacccagatttgccctggaagcacctgaccgctggcaatcagaccgccgagaatggcttttcccatattgccgcagccaataaaaccgattttcttttccattgcctcactcctgccgtgaaattcattgttttgataatcgctggcagaagcataaacagaactatgccggaaggcaaaagcgcgacacaatagaggattacccaacaaaggatgactttatgacaatttgggtggatgccgacgcgtgtcccaatgtaattaaagagattttgtatcgcgcggcggaacgtatgcagatgccgctggtactggtagcaaaccagagtttacgcgtgccgccatcgcgatttattcgtacgctgcgcgtcgcggcaggtttcgacgttgccgataacgaaattgtccggcagtgtgaagcgggcgatttggtgatcaccgcagatatacctttggctgctgaagccatcgagaaaggcgcggcggcgcttaatcctcgcggcgaacgttacacgccagcgaccattcgtgagcgcctgacgatgcgcgattttatggataccttacgtgccagtgggatccagaccggaggaccagatagtctttcacaacgtgaccgccaggcctttgctgcggagctggagaagtggtggctggaagtgcaacgtagtcgtggctaaatgtaatttattatttacacttcattcttgaatatttattggtatagtaagggatgtattgagattttcactttaagtggaattttttctttacaatcgaaattgtactagtttgatggtatgatcgctattctcatgacaccggctttcgccgcattgcgaccttttggggaaaacccacgatgacacaacctctttttctgatcgggcctcggggctgtggtaaaacaacggtcggaatggcccttgccgattcgcttaaccgtcggtttgtcgataccgaccagtggttgcaatcacagctcaatatgacggtcgcggagatcgtcgaaagggaagagtgggcgggattccgcgccagagaaacggcggcactggaagcggtaactgcgccatccaccgttatcgccacgggcggcggcattattctgacggaatttaatcgtcacttcatgcaaaataacgggatcgtggtttatttgtgtgcgccagtatcagtcctggttaaccgactgcaagctgcaccggaagaagatttacggccaaccttaacgggaaaaccactgagcgaagaagttcaggaagtgctggaagaacgcgatgcgctatatcgcgaagttgcgcatattatcatcgacgcaacaaacgaacccagccaggtgatttctgaaattcgcagcgctctggcacagacgatcaattgttgattttcgagcgcctatacttaacgttcatcccgtgaaataaggaagaacgatgccaacgaaaccgccttatcctcgtgaagcatatatagtgacgattgaaaaaggaaagccaggacagacggtaacctggtaccaactcagagccgatcatcctaaaccagactcgttgatcagtgaacatccgaccgctcaggaagcgatggatgcgaaaaaacgctatgaggaccctgacaaagagtgaccgcatcagactgctcggaagggattctgagtgccgccacaagggatctgcgtcacatttttcacaattcatgtttttcaaataattagaatattaaacaataacaatccattactggaatcatttggaatctttacattatgcagtgcaggtctgctgctacgctttttgtcatttgtagcacaagtaagtgtcagcagtggtgcttaacacttgcccggtaattaacgacgaaataaaagtaaggtggaagaacaatgagtgcgtcgttggcgatcctgactatcggcattgtacctatgcaggaagttttgccgctcctgacagaatacattgacgaagataatatttcccatcatagcctgctggggaagttaagccgcgaagaagtgatggcggagtacgcgccagaagcaggcgaagacacaattctcacattattaaatgacaaccatctggcccatgtttcgcgtcgcaaagtggagcgagacctgcaaggtgtggttgaagtgctcgataatcagggttacgacgtcattatattaatgagtacagcaaacattagtagtatgaccgcgcgtaatacgatctttcttgagccgtcgcggatattgccaccgctggtttcctctattgttgaagatcatcaggtgggggttatcgtaccggttgaggagttgctgaccgttcaggcgcaaaaatggcaaattttgcagaaaccgccagtattttcattgggtaaccccattcatgattcggaacaaaaaatcattgatgccgggaaagaattactggcaaaaggtgcagatgtcatcatgctggattgtttgggatttaaccagcgtcatcgcgatttactgcaaaaacagctcgatgttcctgtcttgctctctaacgtattgattgcacggctggctgcggaattactgatgtaattttgcgtgacagccagcgcctctggcccctatagtgaagtagatgttcaactaccagacagggccagtttatgcttcaaagtaatgagtacttttccggcaaagtgaaatcgatcggcttttccagcagcagcactggtcgcgccagcgtgggtgttatggttgaaggtgaatacaccttcagcaccgctgagcctgaagagatgacggtaatcagtggcgcgctgaatgtgttactgcctgacgcgaccgactggcaagtgtatgaagccggttcggtgtttaatgttcccggtcacagcgagtttcatctgcaagttgccgaacccacctcttatctgtgccgctatctgtaattcctcgccttccccttgaacgggagggcatttttctgaaatgtcctctctttaacccataataatatttcctttgctgggattttttcgatttccgatatattcataattcatcaaggttgatataaatatcagcgaagatctccagatattgttgcggaactggcgacgataaaagataaatcagatgatgaatggtggcgtgcattgctgcaaagtcgcaatgatcatttgcgccaaacggcattgcacaacgcacataccccggtgttgttgttaacgacattgactgagcctcaggagcggtcgctggctattaataattcacagctggctgccgatgtgaaaacggcgtggttaaaagaggagccatcattactcttatttgtcgaacaacccgatctttcgctgttacgtgatttagtgaaaaccggggcaacgcggaaaattcgcagtgaagcgcgtcaccggcttgaggaaaaacaatgacacaacgcccctggagcaagttacagcataaaacgcataatattgctgcgctaagaattattgcccgctgtagctaacgattatattcctggtgtggcttcgtacgccggataagacgcggcaggcgtcgcatccggcattaaaggtaaatcagcaattaacgttgtgcttcgccacctaatccttcaatcaggttttgaattaacgctgccagttcaccagtcatcaggatgaaatcggcatcaaaacgctgggcgaaatcttcacggtcgatatcttcgttttgatcgcgcagctcgtcgcagaacttcagacgcttgagcgaaccatcgtcgcacatcacaaactgaatgcgctgctgccagtcgagcgccagtttagtcaccacttttccggcttcaatgtggttggtgatctcttcgctggtcagatcttgtttcttcgcgcggatcacgccgccatcttccagcaacgatttcagctcggcttcatcaagcagctggaagccctgtgccgtgctgccggaacgtacccattcggtcagcgtcagttcaatcgggttttccatgctcaatggtacaaccggtaacgaccccaggcttttacgcaacagtgccagcgtatcttccgcttttttggcgctggcgcagtccaccataatcaaaccgttaaccgtgtcgatccacatcattgtctggctaaaacggctgaaagcacgcggcagcagagagtgcagcacttcgtctttcagcgaatctttttcggttttcttcagcttacgcgcctgttctgcttccagtttggcgattttcgcttccagcgcctgtttaatcaccggggacgggaggattttttcttctttgcgcgcacagataacaatttgaccattggcaacgtgcgttaacgcatcgctgtgcgatcccatcggaggtacccagcccatcttcgccatgtcctggctgccgcatggggtaaatgccatcgaggctagctgtttttccatctcttctgcacgcagcgaaatctcgcggctaagacggtaaaccattaaatttttgaaccacagcatgataatttccacggccttgtcgttaaatttagcgggcatgataacgaattgtcggcggccttgcattgccaatccggttgtccgtctctacgctattgatattgaaaaaaataaggagagtaccgtgcgtataggtatcgatttaggcggcaccaaaactgaagtgattgcattgggcgatgcaggggagcagttgtaccgccatcgtctgcccacgccgcgtgatgattaccggcagactattgaaacgatcgccacgttggttgatatggcggagcaggcaacagggcagcgcggaacggtaggtatgggcattcctggttcgatttcgccctacaccggcgtggtgaagaatgccaattcaacctggctcaacggtcagccattcgataaagacttaagcgcgcggttgcagcgggaagtgcggctggcaaatgacgccaactgtctggcggtttcagaagcggtagatggcgcggcagcgggagcgcagacggtatttgccgtgattatcggcacgggatgcggcgcgggcgtggcattcaatgggcgggcgcatatcggcggcaatggcacggcaggcgagtggggacacaatccgctaccgtggatggacgaagacgaactgcgttatcgcgaggaagtcccttgttattgcggtaaacaaggttgtattgaaacctttatttcaggcacgggattcgcgacggattatcgtcgtttgagcggacatgcgctgaaaggcagtgaaattatccgcctggttgaagaaagcgatccggtagcggaactggcattgcgtcgctacgagctgcggctggcaaaatcgctggcacatgtcgtgaatattctcgatccggatgtgattgtcctgggcggcggaatgagcaatgtagaccgtttatatcaaacggttccacagttgattaaacaatttgtcttcggcggagaatgtgaaacgccggtacgcaaggcgaaacatggtgattcgagcggcgtacgcggcgctgcatggttatggccacaagagtaaaaaaaccaggcaattggcgtatcatgcctgatgcgacgcttgccgcgtcttatcaggcctacaaagtgagccgtccggtaggccggataaggcgctcgcgccgcatccggcaacaaataacgcgcacagtggcggcaaccccccggtgctccgatgcctgatgcgacactggcgtgtcttatcaggcctacaaaatgaacagtcccgtaggccggataaggtgttcacgccgcatccggcaataagcaacgtgcaccgtggctgcaatctaccccactggtttcgccagcaccggactatccgccgcttgctggcgcttatagcgaccatacagcagcaacgacgacatcgcagcaaacgaaagcagggcggcaggtagcgccacgtaattatatgccagccccagcgtcagcatcataccaccgcaatatgcgccgacggcgctaccgaggttaaacgctatttgcccacctgcggcacctaataactctccgcctttggcattttgcagtaacaatatttgcagtggtgctgaaagggcaaataatcccgcgcaacaaataaatgcaaaaataagcgacgttgttttcatgccgccgaagaaaaagagcatcagcagtgccagcacaataataaagtcagttactgccgcaatgcgcagtggtgaataacgtcctgaaatccggccacttagcacattccccagcaccatccctagccccactaacatcataataaaggtcattgccgtttccgaaaaaccggaaataaacatcatgtatggctttacgtagctgaaccaggcaaatacacctgcgttgccaaacatggtggcggcgaaaattaaccacggggcagggctgcgtaaaaagtgaaattgttcgcgtagttttcctttcgcctcgtcgcgaatatccggcacccaaaaatagaccgatgccatcaccgcaatattaaaaacagcgatcaacaaaaaggtgtaacgccaactaaattcctgacttaaatacgttcccagtggaatgcccagcaaattggcgactgtcatcccggaaaccatccctgccacggcggcggtgactttgccgggtttgataatttttgataacacgatcgcgccgacgccaaaaaatgcaccatgcggaaagccggaaaccagccgaccaatggcgagcatcaggtaagacgaagagagcgtgaacatggcgttgccaatgacgcacaacgccaccagaaacaacaagatatgtttgagtgagtagcggctggaaaaaagcgcgattataggcgcaccgaccaccacccccagcgcataatacgagatcatatgcccggcggcaggaatcgaaattcctacgttatgcgccagctccgtgagcacgcccataatgccaaattcggccatccccaaaccaaacgtgcccagagccaaagataaaataacttttttcataccaccatcacaaccaccagaacggctaccaatcaccgtagccaataaagtgatagattgcaggataacgaccagcgaggccaagagataattcgcccctctgtattcattatcctgctgaatagttatttcattgcaaacgcactttccagtttgctgtagcccagtccattgatcttcttcactttgatctgcaccggaatacgctctttcatcgcctcaacgtggctaatcaccccgatggttttgccactggcattcagggcatccagcgcatcaagggcggtatccagcgtttcgctatccagtgtgccaaaaccttcatcaaggaacagcgagtcaatacgcgttttatggctgaccagatctgaaagcgccagtgccagcgccagactgacgaggaaactttcgccgccggaaagggtacgggtatcgcgtaccgcatcagcctgccaggtatcaacaacctcaacttccagcgcttcgctggctttgcgctgtaacagatagcgcccgtgcagccgggtaagttgctgattagcgagatggactaaattatccagcgtcagcccttgggcaaacttgcggaatttatcgccctctttggaacctattagcgaattcagatatccccagtcctcaacctgctgcgtcatttgagcaatttgctgcattaaggtttgttgttgctgacggttatctgcatcctgcttcagctgctggcgaatctcgccttgactcgtggtgttttcacgcaacttttggtgagtttgcgctaactcttgctgaatctgctccaccgtcacagtgagagataacccgccaggtcggtgttgctgatgctgtgtcagcgtttctgctgtctgagtgaccagcgtttgcgcctgacggcgctggttttccagattctgcttgagctgttccagctgcgttagtgtttgttcatccattagcgccgcaaggaacgcctgctgatcgtcaaagacgctcgcctgtagcgcggtgtcaaactgcgcctgggctttttgcagactttgcgccgccagaacatcctgttgctgtaacgtctgctgctggctgtgtaatgcgagacattgttcatgaacctgccgccagttttccagcaccacagtttcttcgctgtgcgggagttcatcactttgcggcaacgtttccagaatcggcgtcagttgctgaatacggttttgcagcgcggttaattcgttctggcgatgctgccagctctgcgcttcttgctgacgcgtcgccaaccagctctcttcttcatcttcctgtggcaatgtcagtgcataacccgccaatgccgttaagagctgctgctggcgttgttcaatttgctgttgatactggataatttgctgattatgcgcggcaatctgcccttgtaattcatgccgttggctgagtaaccgcagctggcgttcgtgctcatcttgtgcatctagccacggttgaatatcgtcctgtggctgcaaggtgatattgaggctggccgtgacggcttgccattgttgagtaagtgcttgctcatcttgtcggaggctttgcgcttcgttttcatcacgctgaagttgctttgttaaggcgtccagttgcccacgtagcgtcgcaccttcttcaccgagctttttaacttcgttttccagcgccagtaatcgagactgattaacgccaggctccagcgcctgatacgcctcgaccgccgggtggctggtggaaccacaaagtggacaaggctgacccgcctgtaactgtgcacgttgagcttccagcgttttgatgcgcgcttcctgctcgcaaatggttttcacatcggcaagttgctgcgtcttttctttataacgctggcgcatttcgttaagtgcggcgttacgttgcgtctgttcttgcgtgacattctggatagtgacctgtaattgcgccaggcgtttttgttggggaacaatctgtccatgcagcgcgaccaggcgctgacgcagcgtgcgttgctcagcatgttgcgccagggcgctagcaacttcatcggcggttaacgtcaacgtaatcgccgcaagcgcattaagtttttgctctgcatgggttaactgttgctgccattgccgcagatgctcgcgatcgctggtttgttgggagaactgcgcacgccaacccgccagttcgttgttccactgacggaagcggtcgtgttcctgtagccaggcattcagactttgttgctgctgctgtaattctgctgactgcttcgccgcgtggtggcgaatgctcgcccgaagcgccattgtgctctgtaagcgagtatttacttcttcaatctgctggcgagtatgcgccagcgccgcgctgtgttctgcgatgcgttcccagtgtggacgaagatttcgtgccggttgtgccagactgagcgccgccagttgaggttgcgctttttcttcttcggctaacgcctgttgcaatgcctgttgacggcggctggcttcttgctgcaattcgtccagacgcgttaaccagtttagtgattgttgttcttgctgctgcgcggtaagtaactgtttttcttcgtcagtaagtacctgcaaactcgctgtcagcgattgcacttgttctggcgtgagcaacgcgacgccgctggcctgcgcttgcagcttctccagctctgtgcgggccgatttgtgctgctcaaaaaccatcgccgagattttcccgtagatttcagtgccggttaactcctcgagcaattccgcgcgttctttgggtttggcattcaggaaggcagcaaattgcccctgcgaaagcagcatcgaacgggtgaagcgcccgtaatccagtccggttaacgtcgccgtcagttccagcttatctttcactttgtcggcgagaattttgccgtctgcgcagcgcgccagctctacgcgtggcacctgcaaattaccgtccggctggttacgcgcccgattctggctccagaacgcgcgatacgcttcacctttgacttcaaaccccacttccgccagacattcggcggtatcgcgagtcatgagatcattttgcgattgtgaaacgttagagaggcgcggggtttcgtgatacagcgccagacaaatggcgtccagcagggtggttttccccgcaccggttgggccggtaatagcaaacagcccgttgctggcgaacggctcgcgggtgaaatcaatcttccattcgccttttaatgagttcaggtttttcaggcgcaggctgagaattttcatgcttcgtgttctccggcgaggctatgcaatgtcgtggcgaaaagatgctgcagacgttgctgctgcgattcatccagttcttccagtgccagacggcgattgaacacctcttcgacgctgagttcgctgagggtttcacgctgttggctggctaacacacgctcgcgctgttcacgactccggcgtaccagcaatacttcgacaggcaatgattcggttaatgcctggattttgcgctgaatatcatgcagatactcatcagtagtgatttcgatatccagccagacaggcggctccagtgatacatcgcgccactgttccagctgtgcggtaatcgacgccagatcgcctttcagcaccgccatgggttgcgttaccggtacgttcaggttttccacgctctctaatttgccgtttgaaaatgtcaccagatggacatatttactcttaccgcattcatcaaaactcagtggaatgggggaaccgcaatagcgaacatgttccatgccgccaataatctgcgcgcggtgaatatgcccgagcgcgatgtagtcggctggtggaaagttttgtgccggaaacgcgtccagcgtgccaatataaatgtcacgcacggcgtcacttttactggcacccacggtcgttaaatgtccagtggcgatgatgggcagaggctgatcgccgcgcagtttgcaggcatcggcatagtgttgttgataataatcagtaatagccgccagcaaatgctgctgtttttcaataccgttaagccccgcctggctggtaataatgtcacgcgggcgtaaaaaaggtatgggacacagcactgcgcctggcgtcccgtcgcgacgaggcaagatttgcggcgtatgtccggcgctggcgaccacggtagtattgaggaacgccatgatatcgcgcgattcattcagcgtggcgaccgagtcatggtttcctgccagtaccaccagatgacagccagtttgctgtaaattgacaacaaaacggttatataaagtacgggcgtaactgggcggcgagccggtatcgaaaacatcaccggcaacaataatcgcatccacctgatgggcttgtgctgtctccagcagccagtcaagaaaagcctgatgttcagcttcgcggcttttactgtagaagttctggccgagatgccagtctgaggtgtgaaggatgcgcataacggttccctggcgaaaaagcatgggcgcgattatacccaaacagatgtgccatttgcttttttctgtgccacggaaatcaataacctgaagatatgtgcgacgagcttttcataaatctgtcataaatctgacgcataatgacgtcgcattaatgatcgcaacctatctattacaacagggcaaatcatggcgagacgtattctggtcgtagaagatgaagctccaattcgcgaaatggtctgcttcgtgctcgaacaaaatggctttcagccggtcgaagcggaagattatgacagtgctgtgaatcaactgaatgaaccctggccggatttaattctccttgactggatgttacctggcggctccggtatccagttcatcaaacacctcaagcgcgagtcgatgacccgggatatcccagtggtaatgttgaccgccagaggggaagaagaagatcgcgtgcgcggccttgaaaccggtgcggatgactatatcaccaagccgttttctccgaaggagctggtggcgcgaatcaaagcggtaatgcgccgtatttcgccaatggcggtggaagaggtgatcgagatgcaggggctaagtctggacccgacatctcaccgggtgatggcgggcgaagaaccgctggagatggggccgacagaatttaaactgctgcacttttttatgacgcatcctgagcgcgtgtacagccgcgagcagctgttaaaccacgtctggggaaccaacgtgtatgtggaagatcgtacggtcgatgtccacattcgtcgcctgcgtaaagcactggagcccggcgggcatgaccgcatggtgcagaccgtgcgcggtacagggtatcgtttttcaacccgcttttaaggccttgctcatcggacgtagagcagggcttatgatttcttaactggagtatcttacgtgctggaacggctgtcgtggaaaaggctggtgctggagctgctactttgctgcctcccggctttcatcctgggtgcattttttggttacctgccctggtttttgctggcatcggtaacaggactgcttatctggcatttctggaatttattgcgcctttcatggtggctgtgggtggatcgtagtatgaccccgccaccggggcgtggtagctgggaaccgctactatacggcttacaccagatgcagctgcgaaataaaaaacgccgccgtgaactgggcaatctgattaaacgctttcgtagcggcgcggagtcgctgcccgacgcggtggtgctgaccacggaagagggcggtattttctggtgcaacggtctggcgcaacagattcttggcttgcgctggccggaagataacgggcagaacatccttaacttgctgcgttacccggagtttacgcaatatctgaaaacgcgtgatttctctcgcccgctcaatctggtgctcaacaccgggcggcatctggagattcgcgtcatgccttatacccacaaacagttgctgatggtggcgcgagatgtcacgcaaatgcatcaactggaaggggcgcggcgtaacttttttgccaacgtgagccatgagttacgtacgccattgaccgtgttacagggttacctggagatgatggatgagcaaccgctggaaggcgcggtacgtgaaaaagcgttgcacaccatgcgcgagcagacccagcggatggaagggttggtgaagcaattgctgacgctgtcgaaaatagaagccgcaccgacgcatttgctcaatgaaaaggttgatgtgccgatgatgctgcgcgtcgttgagcgcgaggctcagactctgagtcagaaaaaacagacatttacctttgagatagataacggcctcaaggtgtcaggcaacgaagatcagctacgcagtgcgatttcgaacctggtctataacgccgtgaatcatacgccggaaggcacgcatatcaccgtacgctggcagcgagtgccgcacggtgccgaatttagtgttgaagataacggaccgggcattgcaccggagcatattccgcgcctgaccgagcgtttttatcgcgttgataaagcgcgttcccggcaaaccggtggtagcggattagggttagcgatcgtgaaacatgcggtgaatcatcacgaaagtcgcctgaatattgagagtacagtaggaaaaggtacacgtttcagttttgttatcccggaacgtttaattgccaaaaacagcgattaattcgcctttgtcatcttttattgccataagccagccgatgctggcttattttctttgcagtcgaaatacgggcgttagattttacaacggttggtgattttttgttcgcatgattagccatgtctttttcattgaaatagtgttttatactggttggtgatttcttatcgctatatacctctggtttttagatcccttcttgctttaaaacgttataagcgtttaaattgcgcttcaggtgctgtcatactgactgcatttacgcggtaaatcgaaaaactattcttcgccgcgcctggttgggagtatttcccgctaaaattgtttaaatataccgctgtatcatccccagggattggcacaaaaatttaacgttacaacaccacatccacaggcagtatgatttatgacccatcaattaagatcgcgcgatatcatcgctctgggctttatgacatttgcgttgttcgtcggcgcaggtaacattattttccctccaatggtcggcttgcaggcaggcgaacacgtctggactgcggcattcggcttcctcattactgccgttggcctaccggtattaacggtagtggcgctggcaaaagttggcggcggtgttgacagtctcagcacgccaattggtaaagtcgctggcgtactgctggcaacagtttgttacctggcggtggggccgctttttgctacgccgcgtacagctaccgtttcttttgaagtgggcattgcgccgctgacgggtgattccgcgctgccgctgtttatttacagcctggtctatttcgctatcgttattctggtttcgctctatccgggcaagctgctggataccgtgggcaacttccttgcgccgctgaaaattatcgcgctggtcatcctgtctgttgccgcaattatctggccggcgggttctatcagtacggcgactgaggcttatcaaaacgctgcgttttctaacggcttcgtcaacggctatctgaccatggatacgctgggcgcaatggtgtttggtatcgttattgttaacgcggcgcgttctcgtggcgttaccgaagcgcgtctgctgacccgttataccgtctgggctggcctgatggcgggtgttggtctgactctgctgtacctggcgctgttccgtctgggttcagacagcgcgtcgctggtcgatcagtctgcaaacggtgcggcgatcctgcatgcttacgttcagcatacctttggcggcggcggtagcttcctgctggcggcgttaatcttcatcgcctgcctggtcacggcggttggcctgacctgtgcttgtgcagaattcttcgcccagtacgtaccgctctcttatcgtacgctggtgtttatcctcggcggcttctcgatggtggtgtctaacctcggcttgagccagctgattcagatctctgtaccggtgctgaccgccatttatccgccgtgtatcgcactggttgtattaagttttacacgctcatggtggcataattcgtcccgcgtgattgctccgccgatgtttatcagcctgctttttggtattctcgacgggatcaaggcatctgcattcagcgatatcttaccgtcctgggcgcagcgtttaccgctggccgaacaaggtctggcgtggttaatgccaacagtggtgatggtggttctggccattatctgggatcgtgcggcaggtcgtcaggtgacctccagcgctcactaaatcactgaacatttgttttaaccacggggctgcgatgccccgtggttttttattgtgttgatgggttaggaattgatggaaagtaagaacaagctaaagcgtgggctaagtacccgacacatacgctttatggcactgggttcagcaattggcaccgggctgttttacggttcggcagatgccatcaaaatggccggtccaagcgtgttgttggcctatattatcggtggtatcgcggcgtatatcattatgcgtgcgctgggggaaatgtcggtacataacccggcagccagctctttctcgcgttatgcgcaggaaaacctcggcccgctggcaggttacattaccggctggacctactgctttgaaatccttattgtcgccatcgccgatgtgaccgcttttggtatctatatgggtgtctggttcccgacggtgccgcactggatttgggtactgagtgtggtgctgatcatttgcgccgtaaacctgatgagcgtgaaggtattcggtgagctggagttctggttctcgttctttaaagtcgccactatcatcatcatgattgtcgccggtttcggcatcatcatctgggggattggcaacggcgggcaaccgaccggtattcataacctgtggagcaacggcggcttcttcagtaacggctggcttggtatggtgatgtcgttgcaaatggtgatgtttgcttacggtgggatcgaaattatcgggattaccgccggtgaagcgaaagatcctgagaaatcgattccgcgtgcgattaactccgtgccgatgcgtattctggtgttctacgtcggtacgctgttcgtcattatgtctatctacccgtggaatcaggttggcactgccggtagcccgtttgtgctgacgttccagcatatgggcattacctttgccgccagcattcttaactttgttgtgctgaccgcttcgctgtcggcaattaacagtgacgtatttggtgtaggccgtatgctccacggtatggcagagcagggcagcgcgccaaaaattttcagcaaaacctcgcgtcgcggtattccgtgggttacggtgctggtgatgactaccgcgctgctgtttgcggtgtatctgaactacatcatgccggaaaacgtcttcctggtgatcgcttcgctggcaaccttcgccacggtgtgggtgtggattatgatcctgctgtcgcaaatcgccttccgtcgccgtttgccgccagaagaagttaaggcgctgaaatttaaagtgccgggtggggtcgcaaccaccatcggcggtttgattttcctgctctttattatcgggttgattggttatcaccctgatacgcgtatctcgctgtatgttggtttcgcgtggattgttgtgctgttgattggctggatgtttaagcgccgccacgatcgtcagctggctgaaaaccagtaatccttgcgttctgtaagccggttcaggaggaaatcctgatccggctattccgaaagttatccgcccccgtcctcctcccccaaatatccttcagatgatgagtgatcctgcattaggctatggcaaggtgatcagattttcatcacaggggaattatgatgttaaatgcatggcatctgccggtgcccccatttgttaaacaaagcaaagatcaactgctcattacactgtggctgacgggcgaagacccaccgcagcgcattatgctgcgtacagaacacgataacgaagaaatgtcagtaccgatgcataagcagcgcagtcagccgcagcctggcgtcaccgcatggcgggcggcgatcgatctctccagcggacaacctcggcggcgttatagtttcaaattgctgtggcacgatcgccagcgttggtttacaccgcaaggcttcagccgaatgccgccggcacgactggagcagtttgccatcgatgtaccggatatcggcccacaatgggctgcggatcagattttttatcagatcttccctgatcgtttcgcccgtaatcttcctcgtgaagctgaacaggatcatgtctattaccatcacgcagccggacaagagatcatattgcgtgactgggatgaaccggtcacggcgcaggctggcggagcaacgttctatggcggcgatctggacgggataagtgaaaaactgccgtatctgaaaaaacttggcgtgacggcgctgtatctcaatccggtgtttaaagctcccagcgtgcataaatacgataccgaggattatcgccatgtcgatccgcagtttggcggtgatggggcgttgctgcgtttgcgacacaatacgcagcagctgggaatacgactggtgctggacggcgtgtttaaccacagtggcgattcccatgcctggtttgacaggcacaatcgtggcacggggggagcttgtcgcaaccccgaatcactctggcgtgactggtactcgtttagtgatgatggcacggcgctcgactggctgggctatgccagcttgccgaagctggattatcagtcggaaagtctggtgaatgaaatttatcgcggggaagacagtattgtccgccactggctgaaagcgccgtggaatatggatggctggcggctggatgtggtgcatatgctgggggaagcgggtggggcgcgcaataatttgcagcacgttgccgggatcaccgaagcggcgaaagaaacccagccggatgcgtatattgtcggcgaacattttggcgatgcacggcaatggttacaggccgatgtggaagatgccgccatgaactatcgcggcttcacattcccgttgtggggatttcttgccaacaccgatatctcttacgatccgcagcaaattgacgcccaaacctgtatggcctggatggataattaccgcgcagggctttctcatcaacaacaattacgtatgtttaatcagctcgacagccacgatactgcgcgatttaaaacgctgctcggtcgggatgttgcgcgcctgcccctggcggtggtctggctgttcacctggcctggtgtaccgtgcatttattacggtgatgaagtgggactggatggcaaaaacgatccgttttgccgtaagccgttcccctggcaggtggaaaagcaggattcggcgttattcgcgctgtaccagcgaatgattgcgctgcgtaagaaaggtcaggcgttgcgtcgtggcggctgtcaggtgctgtatgcggaagataacgtggtggtatttgtccgcgtgctgaatcagcagcgtgtactggtggcaatcaaccgtggcgaagcctgtgaagtggtgctacccgcgtcaccgttgcttaatgtcgcgcaatggcaacgcaaagaaggtcacgggcaactgacggacgggattctggctttgcctgccatttcggctacggtgtggatgaattaacgtcttataacgccttgcgtgacgcctgctccatcatccgcggataaaactgccagaagcgggtttcgagagcatcgtaatgggcgtctaaatcgtaccaggagtcacgcagggcatccagacgtgggcgacggcttgccatgccgtttaacacgctctggatgaaatccatatcgcgatagcgcaccaaccactgctctgaccataagtagttgttcagattgataaagcgttgcggtgagtctggaagaatagtcatcacttgctcccgggcataacaggtaaattcctgtagcggaaaatcgggcgacagctgcgaccagtggcgggacagaaagtgatcccacatcacatccagcgtaataggcgcgacacggcgcgtttcattacgaaaccactcccgcgcttcgcggacttctggcagattgtcggttaatacgtcgattcgccgatgcatatgaatgccagccacgacgtcgggcggaaaactttcttcaggatttccgcgtacgaaatcagccagtaaattgccggaaagcgagctttccgcgagatgggctaaatgcaggtgagctaaaaaattcatatacacttcatccttcaaactgcctcttcgttggctgccttcactcaccccagtcacttacttaatgtaagctcctggggactcattcagttgccatctcgatgcatcttgaatgattttgtgtatagattatgtcatccatcaaggagggtaaaggttgcagggagagcgccccggcactagactacccgcctcttattttagtctgagtcagtgtcatgcgcgttaccgatttctcttttgaattgcccgaatccctgattgcccactatcccatgcctgaacgcagtagctgtcgtttactgtcgctggacgggccgacgggcgcgctgacgcacggtactttcaccgatttactcgataagctcaaccccggcgatcttctggtttttaataatacccgcgtgatcccggcgcgtctgtttgggcgtaaagccagcggcggcaagattgaagtgctggttgagcggatgctcgacgacaaacgcattcttgcgcatattcgcgcctcgaaagcgccaaaacctggcgcagaactgctgctgggcgatgacgaaagtattaacgcaacaatgaccgcgcgccacggcgcactgtttgaagtcgaatttaatgatcaacgttcggtgctggatattctcaacagcatcggccatatgccgctgccgccgtacatcgaccgtccggacgaagatgcagaccgcgaactttatcaaacggtttatagcgaaaaacccggcgcggtagcagcaccgaccgccggactgcactttgacgaacctttgctggaaaaattacgcgccaaaggcgtggagatggcgtttgtgacgttgcacgttggtgcgggcaccttccagccggtgcgcgtcgacaccattgaagatcacatcatgcactcggaatacgctgaagtgccgcaggatgtggtagacgcggtattggcggcgaaagcgcgcggtaaccgggtgattgcggttggtaccacctcagtacgttcgctggaaagtgcggctcaggcagcgaaaaacgatctcattgaaccgttatttgacgatacccaaatctttatctatccgggcttccagtacaaagtggtcgatgcgctggtgacgaacttccaccttccggaatcgacgctgattatgctggtttcggcatttgctggttatcaacacaccatgaatgcctataaagcggcggtagaagagaaatatcgcttttttagttacggtgatgcgatgtttatcacgtacaatccgcaggcaattaatgagcgcgttggggagtaattccgcggcgctggtttaaacgttggactgtttttctgacgtagtggagaaaaaatgaaatttgaactggacaccaccgacggtcgcgcacgccgtggccgcctggtctttgatcgtggcgtagtggaaacgccttgttttatgcctgttggcacttacggcaccgtaaaagggatgacgccggaagaagttgaagccactggcgcgcaaattatcctcggcaacaccttccacctgtggctgcgcccgggccaggaaatcatgaaactgcacggcgatctgcacgattttatgcagtggaaaggaccaatccttaccgactccggcggcttccaggtcttcagccttggtgatattcgtaaaatcaccgaacagggcgttcacttccgcaacccgatcaacggcgacccgattttcctcgacccggaaaagtcgatggagattcagtacgatcttggttcggatatcgtcatgatctttgatgagtgtacgccgtatcctgctgactgggattacgcaaaacgctccatggagatgtctctgcgttgggcgaagcgtagccgtgagcgttttgacagtctcggaaacaaaaatgcgctgtttggtatcattcagggcagtgtttacgaagatttacgtgatatttctgttaaaggtctggtagatatcggttttgatggctacgctgtcggcggtctggctgtgggtgagccgaaagcagatatgcaccgtattctggagcatgtatgcccgcaaattccggcagacaaaccgcgttacctgatgggcgttggtaaaccagaagacctggttgagggcgtacgtcgcggtatcgatatgtttgactgcgtaatgccaacccgcaacgcccgaaatggtcatttgttcgtgaccgatggcgtggtgaaaatccgcaatgcgaagtataagagcgatactggcccactcgatcctgagtgtgattgctacacctgtcgcaattattcacgcgcttacttgcatcatctcgaccgttgcaacgaaatattaggcgcgcgactcaacaccattcataaccttcgttactaccagcgtttgatggcgggtttacgcaaggctattgaagagggtaaattagagagcttcgtaactgatttttaccagcgtcaggggcgagaagtaccacctttgaacgttgattaatattaataatgagggaaatttaatgagcttttttatttctgatgcggtagcggcaacgggtgcaccggcgcaaggtagcccgatgtctttgattttgatgctggtggtattcggtctgattttctatttcatgatcctgcgtccacagcagaagcgcaccaaagaacacaaaaagctgatggactccatcgctaaaggtgatgaagtgctgacgaacggtggcctggtcggtcgcgtaaccaaagtagcggaaaacggctacattgctatcgcactgaatgacaccactgaagtagttattaaacgtgacttcgtagctgccgttctgccgaaaggcaccatgaaggcgctgtaattaaaatttttccctaagggaattgccgtgttaaaccgttatcctttgtggaagtacgtcatgctgatcgtggtgattgtcatcggtctgctgtatgcgcttcccaacctgtttggtgaggatccggctgttcagatcactggtgcgcgcggagtcgccgccagtgagcaaacgctgatccaggtccagaaaacgttacaagaagaaaaaataactgctaagtctgtggcactggaagagggcgctattcttgcgcgcttcgactccactgacacccagctgcgcgctcgtgaagcattaatgggcgttatgggtgacaaatacgtcgtggcgcttaatcttgccccggcaacgccgcgctggctggcagccattcatgctgagccgatgaagctcggccttgacctgcgtggcggcgttcacttcctgatggaagtggatatggacaccgcgcttggcaaactccaggaacaaaatatcgatagcctgcgcagcgacctgcgtgaaaagggcatcccgtataccaccgttcgtaaagaaaacaactacggcctgagcatcactttccgcgatgctaaagctcgtgatgaagccattgcgtatctgagcaagcgccatccggacctggtgattagcagccagggcagcaaccagctgcgtgcggtaatgagcgatgctcgtctgagtgaagcgcgtgaatatgcggtgcagcagaacatcaatatcctgcgtaaccgtgtaaaccaacttggcgtggcggagccggtggttcagcgtcagggtgctgaccgtatcgttgttgaactgccaggtattcaggacactgcgcgtgcgaaagagattctgggtgcgacggcaacgctggaattccgtctggtaaacaccaacgttgatcaggccgctgcggcatccggtcgcgtaccgggcgactctgaagtgaaacagacccgcgaaggtcagccggttgtgctgtacaaacgcgtaattctgaccggtgaccatatcaccgactccacttccagccaggacgaatacaaccagccgcaggttaacatctcgctcgatagcgcgggtggtaacatcatgtctaacttcaccaaggacaacatcggcaaaccgatggcaactctgtttgtggagtacaaagacagcggtaagaaagatgcaaacggtcgtgcggttctggtgaaacaggaagaggtgattaacatcgccaacatccagtctcgtctgggtaacagcttccgtattactggcatcaataacccaagcgaagcgcgtcagctttcactgctgctgcgtgccggtgcgttgatcgcgccgattcagattgttgaagaacgtaccattggcccaaccctgggtatgcagaacattgagcaggggctggaggcttgccttgccggtctgctggtttctattctgttcatgatcatcttctataagaagtttggtctgattgcgaccagtgctctgattgccaacttgatcttgattgtcggtattatgtcgctgttgccaggcgcaacgctgagtatgccaggtatcgcgggtatcgtcttaacccttgcggtagcggtcgatgcgaacgtactgatcaacgaacgtattaaagaagagttgagcaacggacgtactgttcaacaggcaattgatgaaggttatcgtggcgcattcagttccatcttcgatgcgaacatcaccacgctgattaaagtcatcatcctgtangnnnnnnnnnnnnnnnnnnnnnnnnnnnnnnnnnnnnnnnnnnnnnnnnnnnnnnnnnnnnnnnnnnnnnnnnnnnnnnnnnnnnnnnnnnnnnnnnnnnnnnnnnnnnnnnnnnnnnnnnnnnnnnnnnnnnnnnnnnnnnnnnnnnnnnnnnnnnnnnnnnnnnnnnnnnnnnnnnnnnnnnnnnnnnnnnnnnnnnnnnnnnnnnnnnnnnnnnnnnnnnnnnnnnnnnnnnnnnnnnnnnnnnnnnnnnnnnnnnnnnnnnnnnnnnnnnnnnnnnnnnnnnnnnnnnnnnnnnnnnnnnnnnnnnnnnnnnnnnnnnnnnnnnnnnnnnnnnnnnnnnnnnnnnnnnnnnnnnnnnnnnnnnnnnnnnnnnnnnnnnnnnnnnnnnnnnnnnnnnnnnnnnnnnnnnnnnnnnnnnnnnnnnnnnnnnnnnnnnnnnnnnnnnnnnnnnnnnnnnnnnnnnnnnnnnnnnnnnnnnnnnnnnnnnnnnnnnnnnnnnnnnnnnnnnnnnnnnnnnnnnnnnnnnnnnnnnnnnnnnnnnnnnnnnnnnnnnnnnnnnnnnnnnnnnnnnnnnnnnnnnnnnnnnnnnnnnnnnnnnnnnnnnnnnnnnnnnnnnnnnnnnnnnnnnnnnnnnnnnnnnnnnnnnnnnnnnnnnnnnnnnnnnnnnnnnnnnnnnnnnnnnnnnnnnnnnnnnnnnnnnnnnnnnnnnnnnnnnnnnnnnnnnnnnnnnnnnnnnnnnnnnnnnnnnnnnnnnnnnnnnnnnnnnnnnnnnnnnnnnnnnnnnnnnnnnnnnnnnnnnnnnnnnnnnnnnnnnnnnnnnnnnnnnnnnnnnnnnnnnnnnnnnnnnnnnnnnnnnnnnnnnnnnnnnnnnnnnnnnnnnnnnnnnnnnnnnnnnnnnnnnnnnnnnnnnnnnnnnnnnnnnnnnnnnnnnnnnnnnnnnnnnnnnnnnnnnnnnnnnnnnnnnnnnnnnnnnnnnnnnnnnnnnnnnnnnnnnnnnnnnnnnnnnnnnnnnnnnnnnnnnnnnnnnnnnnnnnnnnnnnnnnnnnnnnnnnnnnnnnnnnnnnnnnnnnnnnnnnnnnnnnnnnnnnnnnnnnnnnnnnnnnnnnnnnnnnnnnnnnnnnnnnnnnnnnnnnnnnnnnnnnnnnnnnnnnnnnnnnnnnnnnnnnnnnnnnnnnnnnnnnnnnnnnnnnnnnnnnnnnnnnnnnnnnnnnnnnnnnnnnnnnnnnnnnnnnnnnnnnnnnnnnnnnnnnnnnnnnnnnnnnnnnnnnnnnnnnnnnnnnnnnnnnnnnnnnnnnnnnnnnnnnnnnnnnnnnnnnnnnnnnnnnnnnnnnnnnnnnnnnnnnnnnnnnnnnnnnnnnnnnnnnnnnnnnnnnnnnnnnnnnnnnnnnnnnnnnnnnnnnnnnnnnnnnnnnnnnnnnnnnnnnnnnnnnnnnnnnnnnnnnnnnnnnnnnnnnnnnnnnnnnnnnnnnnnnnnnnnnnnnnnnnnnnnnnnnnnnnnnnnnnnnnnnnnnnnnnnnnnnnnnnnnnnnnnnnnnnnnnnnnnnnnnnnnnnnnnnnnnnnnnnnnnnnnnnnnnnnnnnnnnnnnnnnnnnnnnnnnnnnnnnnnnnnnnnnnnnnnnnnnnnnnnnnnnnnnnnnnnnnnnnnnnnnnnnnnnnnnnnnnnnnnnnnnnnnnnnnnnnnnnnnnnnnnnnnnnnnnnnnnnnnnnnnnnnnnnnnnnnnnnnnnnnnnnnnnnnnnnnnnnnnnnnnnnnnnnnnnnnnnnnnnnnnnnnnnnnnnnnnnnnnnnnnnnnnnnnnnnnnnnnnnnnnnnnnnnnnnnnnnnnnnnnnnnnnnnnnnnnnnnnnnnnnnnnnnnnnnnnnnnnnnnnnnnnnnnnnnnnnnnnnnnnnnnnnnnnnnnnnnnnnnnnnnnnnnnnnnnnnnnnnnnnnnnnnnnnnnnnnnnnnnnnnnnnnnnnnnnnnnnnnnnnnnnnnnnnnnnnnnnnnnnnnnnnnnnnnnnnnnnnnnnnnnnnnnnnnnnnnnnnnnnnnnnnnnnnnnnnnnnnnnnnnnnnnnnnnnnnnnnnnnnnnnnnnnnnnnnnnnnnnnnnnnnnnnnnnnnnnnnnnnnnnnnnnnnnnnnnnnnnnnnnnnnnnnnnnnnnnnnnnnnnnnnnnnnnnnnnnnnnnnnnnnnnnnnnnnnnnnnnnnnnnnnnnnnnnnnnnnnnnnnnnnnnnnnnnnnnnnnnnnnnnnnnnnnnnnnnnnnnnnnnnnnnnnnnnnnnnnnnnnnnnnnnnnnnnnnnnnnnnnnnnnnnnnnnnnnnnnnnnnnnnnnnnnnnnnnnnnnnnnnnnnnnnnnnnnnnnnnnnnnnnnnnnnnnnnnnncatctcgaccgttgcaacgaaatattaggcgcgcgactcaacaccattcataaccttcgttactaccagcgtttgatggcgggtttacgcaaggctattgaagagggtaaattagagagcttcgtaactgatttttaccagcgtcaggggcgagaagtaccacctttgaacgttgattaatattaataatgagggaaatttaatgagcttttttatttctgatgcggtagcggcaacgggtgcaccggcgcaaggtagcccgatgtctttgattttgatgctggtggtattcggtctgattttctatttcatgatcctgcgtccacagcagaagcgcaccaaagaacacaaaaagctgatggactccatcgctaaaggtgatgaagtgctgacgaacggtggcctggtcggtcgcgtaaccaaagtagcggaaaacggctacattgctatcgcactgaatgacaccactgaagtagttattaaacgtgacttcgtagctgccgttctgccgaaaggcaccatgaaggcgctgtaattaaaatttttccctaagggaattgccgtgttaaaccgttatcctttgtggaagtacgtcatgctgatcgtggtgattgtcatcggtctgctgtatgcgcttcccaacctgtttggtgaggatccggctgttcagatcactggtgcgcgcggagtcgccgccagtgagcaaacgctgatccaggtccagaaaacgttacaagaagaaaaaataactgctaagtctgtggcactggaagagggcgctattcttgcgcgcttcgactccactgacacccagctgcgcgctcgtgaagcattaatgggcgttatgggtgacaaatacgtcgtggcgcttaatcttgccccggcaacgccgcgctggctggcagccattcatgctgagccgatgaagctcggccttgacctgcgtggcggcgttcacttcctgatggaagtggatatggacaccgcgcttggcaaactccaggaacaaaatatcgatagcctgcgcagcgacctgcgtgaaaagggcatcccgtataccaccgttcgtaaagaaaacaactacggcctgagcatcactttccgcgatgctaaagctcgtgatgaagccattgcgtatctgagcaagcgccatccggacctggtgattagcagccagggcagcaaccagctgcgtgcggtaatgagcgatgctcgtctgagtgaagcgcgtgaatatgcggtgcagcagaacatcaatatcctgcgtaaccgtgtaaaccaacttggcgtggcggagccggtggttcagcgtcagggtgctgaccgtatcgttgttgaactgccaggtattcaggacactgcgcgtgcgaaagagattctgggtgcgacggcaacgctggaattccgtctggtaaacaccaacgttgatcaggccgctgcggcatccggtcgcgtaccgggcgactctgaagtgaaacagacccgcgaaggtcagccggttgtgctgtacaaacgcgtaattctgaccggtgaccatatcaccgactccacttccagccaggacgaatacaaccagccgcaggttaacatctcgctcgatagcgcgggtggtaacatcatgtctaacttcaccaaggacaacatcggcaaaccgatggcaactctgtttgtggagtacaaagacagcggtaagaaagatgcaaacggtcgtgcggttctggtgaaacaggaagaggtgattaacatcgccaacatccagtctcgtctgggtaacagcttccgtattactggcatcaataacccaagcgaagcgcgtcagctttcactgctgctgcgtgccggtgcgttgatcgcgccgattcagattgttgaagaacgtaccattggcccaaccctgggtatgcagaacattgagcaggggctggaggcttgccttgccggtctgctggtttctattctgttcatgatcatcttctataagaagtttggtctgattgcgaccagtgctctgattgccaacttgatcttgattgtcggtattatgtcgctgttgccaggcgcaacgctgagtatgccaggtatcgcgggtatcgtcttaacccttgcggtagcggtcgatgcgaacgtactgatcaacgaacgtattaaagaagagttgagcaacggacgtactgttcaacaggcaattgatgaaggttatcgtggcgcattcagttccatcttcgatgcgaacatcaccacgctgattaaagtcatcatcctgtatgcagtgggtaccggggcaattaaagggttcgcgattactaccggtatcggtgtggcgacgtcgatgtttaccgcgattgtcggtacgcgtgccatcgtaaacctgctatatggcggcaagcgcgtcaagaagctgtcaatctgaggagtgcgatgtggcacaggaatatactgttgaacaactaaaccacggccgtaaagtctatgactttatgcgctgggactactgggctttcggcatctctggtctgctgttaatcgccgctatcgttattatgggcgtgcgcggctttaactgggggctggattttaccggtggtacggttattgaaattacgctcgaaaaaccggctgaaattgacgtaatgcgtgatgcattgcaaaaagccggttttgaagagccgatgctgcaaaactttggtagcagccacgacatcatggtccgtatgccgcctgctgaaggcgaaaccggcggtcaggtgctgggcagccaggttctgaaggtgattaacgaatccaccaatcagaatgcggcagtgaagcgtattgagttcgtcggtccgagcgtgggggcagaccttgcgcaaaccggtgcgatggcgttgatggcggcgctgctgtctatcctcgtgtacgtaggtttccgctttgagtggcgactggcggcaggggttgttattgcgctggcgcacgacgttatcattacgctgggtattttgtcgttattccatatcgagattgacctgaccattgtggcatcgttgatgtcggttatcggttactcgcttaacgacagtatcgtggtatcggaccgtattcgtgaaaacttccgcaagatccgtcgcggtacgccttacgaaatctttaacgtgtccttgacccagacgctgcaccgtaccttgatcacatccggtactaccttgatggttatcctgatgctgtacctcttcggtggtccggtactggaaggcttctcgctgaccatgcttatcggtgtttccatcggtactgcatcttccatctatgtggcatctgcgctggctctgaaactgggtatgaagcgcgaacacatgttgcagcagaaagtggaaaaagaaggggcggatcagccgtcaattctgccttaatcaagtttcagctgatgttgaaaatcccggtcagaagatcgggattttttttgatgtaaggtgattgcgaaaatccccgcatcttgggaaactgcgcgtaaccctacatttcatccaggtaactttttcatggctatcatcccaaaaaactatgcgcggttagaaagcggctatcgcgaaaaagcattaaaaatctatccgtgggtctgcggtcgctgttcccgcgagtttgtttattccaacctgcgtgaacttaccgttcaccacattgatcacgaccatactaataacccggaagatggcagtaactgggaattactttgtctctattgccacgatcatgagcattcgaaatacaccgaagcggatcagtatggtacgaccgttatcgcaggggaagatgcgcagaaagatgtcggtgaagcgaagtacaacccattcgctgatttgaaagcgatgatgaacaagaagaagtgataaaaaatgccggatatgaaatccggcattctcacaattagaagttgtaacctactaccagataaccaccccagccggtagagcgaacgttgaagttgccgttgccgaagttcagttctgcatcgtcattccactgaccaccgttatgccagtaacgggcaacgacagagtagtgccagtgatcgtaattcagcgccagaatatggctggacgcaatagagttattggtacgtgttttaataccgttgttcgcataaccgctgtcatcgcccaggtcggaaccccagtcgaagttggtgaagccgatgtagctcagctggccgccccacagatcggtaatcggcacaaagtacttcactttgaaacggtaaccgtcccactcgttttcgttcgctgcgccgtagttctgccactggtatttcgcatagacgttcatggacaggctcatcggcagaccagtatcgatgtcggtacccagacccatgtaccaggtgctctggcggccatctttattacgacccatgtcgtaaatgtagttgttcgcgaagtaccactctttgaacggaccaaagctaaggtcagtattggtcagcttgtcgatggagaaacgcggttcgatttccataaacagcggagaaccgtggttccagataccttttgcatcggagttaccgccgaagaataccggcgcatccgcataaccatagaagtcgaaccagtcttttttagcgaatgcttcgtactcaaggtaggtatcgttgcggagctgcggtccgaaacgggtgtgatagcttccgacaacgttaacgctctggtgccaccagtcggaaagatactgcggtttgtcgttttcagctgcgttgacagtaaaagacgaagagagcgccagtaccgcaccggctgccagtaatgtttttttcatatgtatgccactgtttgaaaatcccttgcgggagtgaaaaaggcgcaaattgcgtttctaaatatttcgtatacagaggagcctattataaaaatcattgctcacaaaaatatgtttcgtttcacagttctatcatttacgtaatcgattgcgttcacgtttacacacattcgggcggggattgtactgactttcacccttgttgcaaacttttactatcaatccaggtgatgtaagcggagtaacaaaatgacggagaaagatgttgcgggacgcacaatatcgccccgcaatacgtttactgcataacaggttgaatgtcgtggatacgtacaaagcctaactgatccacagacataccctttaactgtaacggaatatcaacatcgctgggggcgaggacgctggcaggtgcgttaatcaattgattctgcacattgatttcctgaaagttgtctattgttccctgaatttgcccatattcaacggttccgctaaatgcgggtaaagggtcattggattcgccctgaatacgtagcgtcagggtggtgccatctgtatcaggcgtaatattcaccagcgacatacgtaaagtaccgatctggctttccagtcttgctggtgtttttgctccaggcagaaggtaaaccccactgctggattttgcattcagcctgttttgctgagtgattttgaccgtttctttattgagctgcgtcatctcctggttcagcgtgctgacgctgtgtttcatctgtcgcacttcactttgctgcacacaggcgctaaggctgaacaggcttcccagcaggagcagtcgaaaaacgttagtattcataggtcgtccctttctcgtcgcaattagcctagtggtagagggtaaaagcagtgaaagcatcgatcctttatctcaaaagcgttgcgcctttgttgtatcgtcagttcagggtaaaatagatttctgttaaccacctggtcaggacgccgtatgcattgcccattctgtttcgccgtggacactaaggtaattgactctcgtctcgtgggcgagggttcatccgtacgccgccgtcggcagtgtctggtgtgtaatgaacgtttcaccacctttgaagtggcggagctggttatgccgcgtgttgtaaaaagcaacgacgtgcgtgaaccgtttaatgaagagaaattacgtagcggaatgctgcgggcgctggaaaaacgtccggtgagttccgatgacgtcgaaatggcaatcaatcatataaaatcgcagctgcgcgccaccggtgagcgcgaagtgccgagcaagatgattggcaatctggtgatggagcaattgaaaaagctcgataaagtcgcctatatccgttttgcctctgtctaccgcagtttcgaagatatcaaagaatttggcgaagagatcgcgcgcctggaggactaagccgtgcaggacgagtattacatggcgcgggcgctaaagctggcgcaacgaggacgttttaccacgcatcccaacccgaatgtcgggtgcgtcattgtcaaagatggcgaaattgtcggtgaaggttaccatcaacgcgcgggtgagccgcatgccgaggtacacgcgttgcgcatggccggcgaaaaagccaaaggcgcaacggcgtatgtcacactcgaaccctgtagccatcatggtcgtacgccaccgtgttgtgatgcattaattgctgcgggcgtggcgcgcgtggttgctgcaatgcaagaccccaatccgcaggtcgctggacgtggactttaccgtctgcaacaggctggcattgacgtcagccacgggctgatgatgagtgaagctgagcaattgaataaaggctttctcaagcggatgcgcaccggctttccttatattcagttaaaacttggcgcatcgcttgatggtcgcacggcgatggcgagtggcgaaagccagtggatcacttcacctcaggcgaggcgcgacgtacaacgactgcgcgcacaaagtcatgccattttaaccagcagcgccacggtgctggcggatgatccagccttaacagtgcgttggtctgaactggatgaacaaactcaggggctctacccgcaacaaaatctccgtcagccggtacgtattgtgattgatagccaaaatcgcgtgacgccggaacatcgcattgtgcagcagcccggcgaaacctggttcgcgcgtacgcaggaagattctcgtgagtggccggaaacggtgcgtaccttgctgattccagagcataaaggtcacctggatctggttgtactaatgatgcaactgggtaaacagcagattaacagcatctgggtggaagcggggccaacgctcgctggcgcattgctacaggcgggtttagtcgatgagctgattgtctatatcgcacctaaactattaggcaacgacgcccgtggattatgcacgctgccagggcttgagaaattagccgacgctccccaatttaaattcaaagagatacgtcatgtaggcccggatgtttgcctgcatttagtgggtgcatgatctcccggctcgaaagggaagcagcgcacgaaatattatgctaaaatccgcccccctgcggggccatactcgaacccgaaggaagaaaatgaacattattgaagctaacgttgctaccccggacgctcgcgtcgccatcaccatcgcgcgtttcaacaactttatcaatgacagcctgctggaaggtgcaattgacgcactgaaacgtatcggtcaggtaaaagatgaaaacattaccgttgtttgggtgccaggtgcctatgagctgccgctggcggcgggtgcactggctaaaaccggtaaatacgacgcggtgattgcgctgggtacggttattcgtggtggcactgcccactttgaatatgtcgctggtggtgcaagcaacggcctggcgcatgttgcccaggacagcgaaattccggttgcttttggggttctgaccactgaaagcattgaacaagcgatcgaacgtgctggcaccaaagctggcaacaaaggtgcagaagctgcactgaccgcgcttgaaatgattaatgtattgaaagccatcaaggcctgaaattagtaaggggaaatccgtgaaacctgctgctcgtcgccgcgctcgtgagtgtgccgtccaggcgctctactcctggcagttgtcccagaacgacatcgctgatgttgaataccagttcctggctgaacaggatgtaaaagacgttgacgtcctgtacttccgtgagctgctggccggggtggcgactaacaccgcatacctcgacggactgatgaagccgtacctgtcccgtctgctggaagaactgggccaggtagaaaaagcagtactgcgcattgcgctgtacgagctgtctaaacgtagcgatgtgccatacaaagtggccattaacgaagcgatcgaactggcgaaatcgttcggcgcagaagacagccataagttcgtcaacggcgtactcgataaagcagcacctgtgattcgccctaacaaaaagtaatatccaggccggtagattcacggaagaccgttccgcgatcgccggccttttcttttttatctgctgaggcgtaacgtatggcatgtggcgagttctccctgattgcccgttattttgaccgtgtaagaagttctcgtcttgatgtcgaactgggcatcggcgacgattgcgctcttctcaatatccccgagaaacagaccctggcgatcagcactgatacgctggtggcgggcaaccacttcctccctgatatcgatcctgctgatctggcttataaagcactggcggtgaacctaagcgatctggcagcgatgggggccgatccggcctggctgacgctggcattaaccttaccggacgtagacgaagcgtggcttgagtccttcagcgacagcttgtttgatcttctcaattattacgatatgcaactcattggcggcgataccacgcgtgggccattatcaatgacgttgggtatccacggctttgttccgatgggacgagccttaacgcgctctggggcgaaaccgggtgactggatctatgtgaccggtacaccgggcgatagcgctgccgggctggcgattttgcaaaaccgtttgcaggttgccgatgctaaagatgcggactacttgatcaaacgtcatctccgtccgtcgccgcgtattttacaggggcaggcactgcgcgatctggcaaattcagctatcgatctctctgacggtctgatttccgatctcgggcatatcgtgaaagccagcgactgcggcgcacgtattgacctggcattgctgccgttttctgatgcgctttctcgccatgttgaaccggaacaggcgctgcgctgggcgctctctggcggtgaagattacgagttgtgtttcacggtgccggaactgaaccgtggcgcgctggatgtggctctcggacacctgggcgtaccgtttacctgtatcgggcaaatgaccgccgatatcgaagggctttgttttattcgtgacggcgaacctgtcacgttagactggaaaggatatgaccattttgccacgccataaagatgtcgcgaaaagtcgcctgaaaatgagtaatccgtggcatctgcttgctgtcggattcggaagtggattaagcccgatcgttcctggcacgatggggtcgctggcggcgattcccttctggtatctgatgacttttttgccctggcagctctattcgctggtggtaatgctggggatctgtatcggcgtctatctttgtcatcaaacggcgaaagacatgggcgtgcacgatcacggcagtattgtctgggacgaatttattggtatgtggattacgctcatggcgctgccgaccaatgactggcagtgggttaccgccggatttgtgattttccgtattctggatatgtggaagccgtggccgatccgctggtttgatcgcaatgtacatggcggcatggggatcatgattgacgatattgtcgccggggtgatctccgctggcatcctgtattttatcggtcatcactggccgctgggtattctgtcgtagttgtgcaccgatgcctgatgtgacgcttgtcacgtctcatcaggcctgcatacctatttaaatcctacgaccggatgcggtttatacggcgtttccagctcggcgatctgttccggcttcaaggtgatatccaccgcgtttagcagttcatcaagctgttcctcccgagaagttccgataatcggtgcggcaatgcccggtttactcaacaaccaggccagcgcaacttgtgctcgcgttgcaccaagttcttcactgacgcccgttaagcgttctgcaatttgtgcgtcattttcattgctttcttggtagagatttttccccacttcatccgacaccagccgtgcggtggtttctccccaaggacgcgtcagacggccccgcgccagcgggctccatggaatcaccgccacgccttcctgataacacagcggcagcatctcgcgctcttcttcacgataaatcagattgtagtgatcctgcatactgacaaactgcgcccagccgtgctgtttttgtagttccagtgcctgagcaaactgcgaagcgtgcatggatgacgcgccgatataacgcgctttcccggcttttaccacgtcgttcagggcttccagcgtctcttcgatcggcgtgttgtaatcccagcgatgaatttgcaggatatcgacataatccatgccgagacggcgcaggctgtcgtcgatagagcgcaaaatttgtgcacgggataatccttccggtaaatcaccaacgcgatggaacactttggtcgcaacgaccacgtcttcacgacgggcgaaatcccgcagtgcgcgaccgacgatctcttcgctgctgccatcggaatagctattggcggtatcaaagaaatttatgccgccttccagcgcacgtttaatgatgggacggctgctctcttccggcagtgtccatgcgtgattaccgcgatctggctcgccaaaggtcatacagccgaggcaaagtcgggaaacacgaaggtcggtttttcctaaggggttgtattgcatgctgccactcctgccatgaataatttcttaagcatagcaggagtagagtagggattatgccagccaggctttgattttggcttccataccggtggcatcgaggccgagttcggcgcgcatttcttcctgagttccttgtggaataaagaagtccggcagaccaatgttcagcacgggtactggtttacgatgggccatcagcacttcgttcacgccgctgcctgcaccacccataatggcgttttcttctacggtaaccagcgcttcatggctggcggccatttccagaattaacgcttcatcaagcggtttcacgaaacgcatatcgaccagcgtagcgttcagcgattcagcgactttcgccgcttctggcatcagcgtaccaaagttaaggatcgccagtttctcaccacgacgcttcacaatgcctttgccaattggcagtttttccagtggcgtcagttccacgccaactgcgttgccgcgcgggtagcgcaccgcggacgggccatcgttatagtgatagccggtatagagcatctggcgacattcgttttcatcgctcggggtcataatgaccatttccggtatgcagcgcaggtaagagagatcaaaagcgccctggtgggtttgaccgtcagcaccaacaatgcccgcacggtcgatggcgaacaggaccggaagcttttgaatcgccacgtcatgcagcacctgatcataggcgcgttgcaggaaggtggagtagatcgcaacaatgggtttgtagcctccaatcgccagacccgcagcaaaggtcactgcgtgttgctcggcaattgccacgtcgaagtagcgatccgggaatttacgtgaaaactcgaccatgccggaaccttcacgcatcgccggagtaatcgccatcagcttgttatctttcgctgcggtttcgcacaaccagtcgccaaagatttttgaatagcttggtaaaccgccgctacttttcggcagacaaccgctggagggatcaaatttaggcacggcgtggaaggtgattgggtctttttctgccggttcataaccacgaccttttttggtcatgatatgcaggaactgcgggcctttcaggtcgcgcatgttcttaagcgtggtgataagccccagcacatcgtgaccgtccaccgggccgatgtagttaaagcccagctcttcaaacaacgtgccaggcactaccatgcctttaatatgttcttcggtacgtttgagcagctctttaatgggtggcacgccagagaaaactttttttccgccttcgcgcagtgaagagtaaagcttaccggaaagcagctgcgccagatggttgttgagcgcgccaacattttcggaaatcgacatttcattgtcgttgagaaccaccagcatatcaggacggatatcgcccgcgtgattcatcgcttcaaacgccatgccagcagtaatcgcgccatcgccaatgacacagacggtgcggcgatttttgccttctttctcggcagcaactgcgatcccaattccggcactgatggaggttgatgaatgcccgacgcttaatacgtcatattcgctttcgccgcgccacgggaacgggtgcaggccacctttctgacggatggtgccgattttgtcgcggcgcccggtcaaaattttatgcggataagcctgatgccccacatcccagattaactggtcaaacggggtattgtagacatagtgcagcgccacggtcagttcgaccgtgcccagcccggaggcgaagtgcccgctggaacggctcacgctgtcgagtaaatagcggcgcagttcgtcgcagagtttcggtaaactctctttcggcaacagtcgtaactcctgggtggagtcgaccagtgccagggtcgggtatttggcaatatcaaaactcatcaggggcctattaatacttattgtttatttattacgctggatgatgtagtccgctagcgcttccagtgccgaggtatcgagtgactgttcagtcagttgtttcagcgactgacgggcatcgtcgatcagatcccgggctttcttccgggcttgctcaagacccagaagtgcagggtaggtacttttaccaagttgctggtcggcaccctggcgttttcccaacgttgcagtatctcccaccacatccaggatgtcatcctgaacctggaaggcaaggccgatgctctctgcgtacttgtcgagtactggcagtgcatttcgtcctttatctccggcgcttaatgcaccaaggcgaacggcggcgcgaatcaatgcgccggttttatgacgatgaatacgctcaagcgcgtccagaggtacgtgtttgccttcagcgtctaaatctaatgcctgaccaccgcacattccggcaataccgctggcgctcgccagctcagaaatcatcgaaattctgtcgcgatctgacacttccggcatatcggcatcgcttagaatcgagaacgccagcgtttgtaaagcgtcaccagcgagaatcgcgtttgcttcgccaaacttcacatggcaggtcggcaaaccgcgacgcagatcgtcatcatccatcgccggtaaatcatcatgaattaatgagtaagcgtggatacactctacggcggcagcgggtgcgtccagtgtgtttatgctaacgccgaacatatgaccagtggcataaaccaggaaaggtcgcaggcgcttaccacctaataatgcgccatactgcatggtttcgaccacgggagtgttctgaaagggcagtggggcgataaaacggctcagcgcctggttggcctgcttaacgcaggcttcgagttgctgcggaaagtccattactcattgtccggtgtaaaaggggttagagaggcgtcttcattgtcagacagcagaatttgtacgcgctgttcggcttgttgtaatttggcctgcccctgacgtgccagctgcacgccgcgttcgaactcgttcagcgcctcttccagcggtaggtcgccactttccagacgggttacaatctgttccagctcgctcagcgccttttcaaagctggcgggagcctcatttttcttcggcataatgaatgtctgactctcaatatttttcgccccgtcatggtaacggactcagggcaaatagcaaataacgcgcaatggtaaggtgatgtgcgcagcaaagcgatgttagtggtatacttccgcgcctggatgcagccgcaggtgtgggctgctgtatttttccctatacaagtcgcttaaggcttgccaacgaaccattgccgccatgaagtttatcattaaattgttcccggaaatcaccatcaaaagccaatctgtgcgcttgcgctttataaaaatccttaccgggaacattcgtaacgttttaaagcactatgatgagacgctcgctgtcgtccgtcactgggataacatcgaagttcgcgcaaaagatgaaaaccagcgtctggctattcgcgacgccctgacccgtattccgggtatccaccatattctcgaagtcgaagacgtgccgtttaccgacatgcacgatattttcgagaaagcgttggttcaatatcgcgatcagctggaaggcaaaaccttctgcgtacgcgtgaagcgccgcggcaaacatgattttagctcgattgatgtggaacgttacgtcggcggcggtttaaatcagcatattgaatccgcgcgcgtgaagctgaccaatccggaagtgactgtccatctggaagtggaagacgatcgtctgctgctgattaaaggccgctacgaaggtattggcggtttcccgatcggcacccaggaagatgtgttgtcgctcatttccggtggtttcgattccggcgtttccagttatatgctgatgcgtcgcggctgccgcgtgcattactgcttctttaacctcggcggcgcggcgcatgaaattggcgtgcgtcaggtggcgcattatctgtggaaccgctttggcagctcccaccgcgtgcgttttgtcgccattaatttcgaaccggtcgtcggggaaattctcgagaaaatcgacgacggtcagatgggcgttatcctcaaacgtatgatggtgcgtgccgcatctaaagtggctgaacgttacggcgtacaggcgctggtcaccggcgaagcgctcggccaggtgtccagccagacgctgaccaacctacgcctgattgataacgtctccgatacgctgatcctgcgtccgctgatctcttacgacaaagagcacatcatcaacctggctcgccagattggcaccgaagactttgcccgcacgatgccggaatattgcggcgtgatttccaaaagcccgacggtgaaagcggttaaatcgaagattgaagcggaagaagagaagttcgacttcagcattctcgataaagtggtggaggaagcgaataacgttgatatccgcgaaatcgcccagcagaccgagcaggaagtggtggaagtggaaaccgtcaatggcttcggcccgaacgacgtgatcctcgatatccgttctatcgatgaacaggaagataagccactgaaagtcgaagggattgatgtggtttctctgccgttctataaactgagcaccaaatttggcgatctcgaccagagcaaaacctggctgttgtggtgtgagcgcggggtgatgagccgcctgcaggcgctctatctgcgcgagcagggctttaacaatgtgaaggtgtatcgcccgtaatatgtggttgtaacgtcgcatctggtcagatgcgacgtttaccgcatccgacactactcgtaataattataaatccctgccgccatcaccagttgtgatgccacttcatgggctttctcgcgcccaaccagcaggtcgataattttcagaccaaagtcgatagctgtacctggcccctggctggtcagcaattttacccgtgcatcccagacgacgcgcttgtcctgccattgttcggcgggtattttgtctttcagcgtcgggaagccggtcatattgccaatcgggaagatatcgtgcgggaccagcacggtggctggcgcggcgcaaatagccgcgacgatacgcccggaacggtggaactgtttaacggtttcaaccagcagggtgctatcgcgaaaacactctgcgcctttgatgccaccaggcagcacaatcacgtcatattcgccatcagccacttcaaccagcggcgcatccgccagcagcttcacgccgcgcgagcaggtaatcgccaggttaccatcgctggcgacgctggcagtggtgactttgataccgccgcgaaccagcagatcgatagtggtgacggcttcagtctcttcactaccaggggcgaggcaaaccagtgccgatgcgctcatattcactctcctttctttttaccatttcaaacaggcgggtgttttccggtacggcaatcccatgcgcgcgggcgcggcgtaagagaaaaccattgatatagtcgatttcggtgtggcgcagcgcgcggatatcctgcaacatcgacgagatattttccgctgttgcatcaatcacctgcatcacgtaatcacgcaaatcttctgctgaagtatgatgcccttcgcgttcgatcactgccgcgacttcttcgcatatctgtataatttcttgcggatgatgacgtaattcaccattcgggcaattccaggtggcggtcagtggattaatcacacagttgactgccagcttgcgccacagctcggcgagaatattgttatgccaggcaacgtcaggcaatacggtttgcaaaatatccgccagataactgtaatcgccgtcctgttgccgtgccggaccaatatgcgtgataccgtttgccacatgaataatgacattgccgtcgcggcgggcggcatgggtggtggtgcccatcagtaatggctgctgaatgttttgcaactcttcgatggtgcccatgccgttgtgaattaacagtattggcgtggttacaggcagtgtggacgcgaggcttttgacggcatcggaaacctgccatgctttcagcgtcaccaggagcagatcgctggtggcgagaaaatcgggatcgttggcggtcagcgattcgttaaatatcgaaccatctgtctcaaccagattcacactacaataaggttgcggtacgcgcagccagccctgaacgtcgtgaccctgtttacaaagtgctgtaagccataattgccctaaggcaccgcatcccaatacggtaattttcattgttcctcctcacccgcaaccactccgggtgttcaataaggctatcccttaattgtgcatgctgttgcgactatgcacaattaagggatacgtcctggtgcaggactgttggttatttaactttgcaggtattatgcttcgcatcaaaaatgaagggagaggaaaagatgccatctttcgatattgtctctgaagttgatcttcaggaagcacgtaacgcggtcgataacgcgagccgcgaagtggagtcccgttttgacttccgtaacgttgaagcctcatttgagctgaatgacgccagcaaaaccatcaaagtgttgagcgagtccgacttccaggtcaatcagttgctggatattctgcgtgccaagttgctgaagcgcggcattgaaggcagttcactggatgtaccggaaaatatcgttcatagcggtaaaacctggtttgtggaagcgaaactgaaacagggcattgagagcgcgactcagaagaaaatcgtcaaaatgatcaaagacagcaaactgaaagtgcaggcgcaaattcagggcgatgagatccgcgtaacgggtaaatctcgtgatgatttacaggctgtcatggcgatggtacgtggtggcgatctcggtcagccgttccagttcaaaaacttccgcgattaatcgcgacaacctgcgctttgttcatgtcagatgcggcatgaacgcctgattcggcctacaaaggtttgtaactcaggaacttagtaggcctgataagcgtagcgcagcaggcaatttcgcctcgcttttatgcctggcgaattgcctgttcaacctcaaagcgattcgtcactttgctgtcgattttcacataagctgaatgttcttcttctgcaatcaacacttctttgatgccttcagtttccagcaaacgcacttttaacgcctcgtttgcggcaatgttcgccgggatttcaatgcgcaagctgctgacatacggcggttctttcatggtactggcgactgccagccacactgcggccagcattgcgccagcgagaaatacgccctgaccgtcaaacatgccgtcaatccagccgcccagcgaaccgccaatcgccacgccaagaaactggctggtggagtaaacacccatcgccgtacctttgtaacctgctggcgactctttactgataagtgaaggcagaagggcttccatcaaattaaacgccacaaagaaaagctgcacgccgaccaccagttgccagaactgcgtttgtgcgttccacaacacaatttccgcaaccacgatcaacccgacgcagaagacaaagacttgcttcattttgcgcttaacttcagcgtagataatgaaaggcacgaccgagccaaaggcgattaacatcgttgccaggtagaccttccagtgttcagccgccggtaaccccgcatcagccatctgtccgggcagggcaacaaaggtcgacatcagcaaaatatgcagacacataatgccaaagttgagtttcagcagccgcggttccgccagcactttactgaaactgcctttcaccattccggactcacgattaagtacgtgagtgctactgttgggcacaacccaaatggtcaacgcaatgccggttgttgccagaatagcgatcatccagaacagcgcgtgcagcccaagtttgtgagtgatgatcgggccaagcaccatcgcaatggcaaaggtaatgccaaagctcacgccgataaacgccatcgctttggtgcggttttgttcgcgcgtgagatcggaaagcagcgccataacggcagcggcaatcgcaccggagccttgtagcgcccgacccagaataattccccagatggagtcagagagcgcagcgataacgctaccggcggcaaacaccgccagcccaccgacaattaatggtttgcgaccaatgcggtctgaaagcaggccaaacggaatctgaaaaacggcctgagtcagaccataaataccaatggcaataccgattaatgcttcgctggcaccttgcagagccatgccgtacgtggtcagaaccggcagaaccatgaacatgcccagcatgcgcaacgagaaaacggtgcctaaaccccaggtcgcgcgccgctcacctgacgtcattttataatcgttcattaccacctctgttttaaatccgcgactagtgtaaagcggcaaacgaatggggtaaacatgcggattttttagtaaatatttcgagagggatatgattctaatgctaagaaaaaaggtgccgtagcacctttttaactgagaggttgtgttaccacacagcagccagcagcgtatgcgagtccggcaccataaaatcaacggacatcatcaccgagagggcagtgatggcgatgatagagaaaccgaacagcttgcgtgcccagattctgtcatcagcaactttatagccgcgcagagccatgcctaaccaccagacgctcaccgcagcggcgaccaccagatatttatacccagcgtagccgccaagagagagcatcagcgtggcaacggcaaaggcgatgatatacagcgtgatgtgattcttcgccaccgaaatgcctttcaccaccggcagtaccggaatgtttgctgcctgataatccttaaagcggaaaatggctatggcataagagtgaggcatctgccacaggctgaagatagccagcaggatcgctgcgccgctatcgaactcgccggttaccgcacagtaaccgatcaccggaggcgcagcgccggagagcgaaccaatcaaggtgccgtagacagaatgacgtttcatgtacaggctataaacgccgacataaaccacaaagcccatcacccccagccagcaggccagcggattcgcgccaaaccacagcagcataaagccagcaatacccagcaaggtggcgtacaccagcgagacagcaggagagatcaggcctttaaccagcacccgattcttcgtcctttccatctttctgtcgatatccctgtcgatgtagttgttaaacacacaacccgacgccacaaccagtgacaccccaaccagcgtgtagataaacaggggataatcaatgctgccctttgaggccaacaggaatcccccaatcaccgagatcaggttgccaaagatgatgcctggtttcgttacttgcaggtattgcttaaacatcataaccgccgctcttagtgcatcatcatgttgtagttgaggttccacataatccaaatggagcccacaaccaggatggcgatgattagcacggtgaagacaaatgccgtcatattccagccttcatctgatttggtattcatgtgcaggaagcacaccagatgcaccagaatctgtaccactgccattgccaggattgttcccagaattacggccggagaggcagcccctgtcatcaccatccagaacggaatcaccgtcagaatgatcgacaggataaagcctgtcatgtaggtttttacgctgccatgggacgcgccgccgctcacgttagaatgactcattacatcgcccccatcagataaacaacagtgaacacacagatccaaaccacatccaggaagtgccagaacaggctcagacacatgatgcgggtacggttagtgctggtcaggccgcgacgggcgatttgcaccatcagcaccgccatccagataagaccggaagtgacgtgcagaccgtgcgtgccgaccaacgcaaagaacgctgacaggaagccgctgcgatccggacccatgccgttaacaatcaggtgatggaattcatagatttccatcccgataaatccggcaccaaacaaccatgtcaacgccagccaggagatcacctggcttttgttgtttttgtacatggcgatagccgccatgccataggtgatggagctgaacaacagcaagaaagtttcaaccagaacgaacggcagttcgaaaatgtccttacctgtcgggccgcctgcggtgccgttcaccagaacggcataggtagcaaacaagatagagaacagaatgcagtcgctcatcaggtagatccaaaatccgaaaattttggttccgcctgcatcgtggtgcccgtgttcgtgcgcgtgggcagtcgcgtgcgtcaaagtatcagttgccatttttcagccctgccttagtaatctcatcgaaatgctggttttccagtttttcgatttctgccaccggcacgtagtaatccacgtcctcgtcgaagcttttcacgatccaggtgatgatcatgcctgcgaagccaacaatcgccagccaccagatatgccagatcatggcgaaaccgaagatggtggagaaagccgcaatgacgataccggcaccgctgttttttggcatatgaatttcttcatagtggtcaggctttttgtacgcttcgcctttctctttcatttcccagaatgcatcacgttcgtgaacgtgcggcacaacggcaaagttatagaacggaggcggggaagaggttgcccactccagcgtacggccaccccacgggtcgccagtcaggtcacggttctggtcgcggtcgcgaatagaaacgtacatctgaataacgaggcagagaatacccagcgcaatcagtaccgcaccgctggctgcaatcatcagcatggtgtggaactgcgggtcaatctgctggctcaaacgacgggtcatccccataaagcccaacgcatacagcggcataaaggcaacgaagaagccgatgatccagaaccagaacgcgcgtttaccccaggtttcgttcagtttgaaaccgaacgctttaggccaccagtaggtcatccctgcgaagcagccgaagaccacgccgccgatgatcacgttatggaagtgtgcaatcaggaacaggctgttatgcagaacgaagtctgcgccaggtactgccagcagcacgcctgtcataccgcccaccgagaaggtgacgataaaaccgatggtccacagcatcgcagaatggaacacgatgcggccctgatacatggtgaacagccagttgaagatcttcaccccggttgggatggcgataatcatggtggtgataccaaagaaggcgtttacgttcgcgcccgcacccatcgtaaagaagtggtgcagccaaacgatgaacgacagcacggtgatacagacggttgcccataccagcgaggtataaccaaacagacgtttacgcgagaaagttgccgcaatttcggagaacacaccgaatacaggcaggatcaagatgtaaacttccgggtggccccaggcccaaatcaggttgatatacatcatcatgttgccacccatatcgttggtaaagaaatgggtgcccagatagcgatccagggtcaacaacgcgacggtaaccgtcagaattgggaaggaagcaataatcagtacgtttgcgcacagtgatgcccaggtaaatactggcatcttgaacatggtcatgcccggtgcgcgcatcttcagaatggtaacgaagaagttgataccggtaagcgtcgtacctataccggatagctggagactccatatccagtaatcgacaccgactcccggactgtactctattcccgatagcggtggataggccagccagccggtctgcgcaaattcgcccacgccgagagaaacgttaaccagaatcacaccaacaacggtaaaccagaagcttaagttgttgaggaacgggaacgcaacgtcacgcgcgccgatctgcagcggaaccaccaggttcatcagaccgataacgaaaggcatcgccacgaagaagatcataatcacgccgtgcgcggtgaagatctgatcgtagtggtgaggtggcaggaaacccgcttcgcccgccgaggcaagagcctgctggctacgcatcataatggcgtcagcaaaaccacgcagtaacatcacaatcgccacgatgatatacatgataccgaggcgtttatggtcgacggaggtcagccactctttccacaggtaggtccacttaccgaagtaagtgatcaggccaacgagcgccagacctcccaaaataatgccagcgatcgtaaccatgacgataggttcatggaacgggactgcatcaagtgataattttccgaacatctttattcttcctcaacccctttaatgggcggattccgcgtggctcatgtccatgccttccataccttcgtgtgcactgtgctcaccttctggctgggtcatgtccatgctcttaccgtgagccataaacttgttaatcacatcagcaaacaagtctggtttcacgttggagaaatattccacctggttgtattcgctaggcgcggccagtttttcgaacgctgccatgtcagacatggtgttcggcgactgtttcgcttttgcgacccattggtcgaatgcggcgcgatccggtgttgcaatagctttgaacttcatgcctgagaagcccgggccgctgtagctggcggagataccgtcataagtaccgggttcgttggcgatcagatgcaggcgagtctgcataccggccatggcataaatctggctacccagacgcggaatgaagaaggagttcatcacggagttggaggtcactttgaagtacaccggagtgttcgccgggaaagcgatttcattcacggtagcaatgccctgttccgggtagatgaagaaccatttccagtccatggaaaccacttcgatggtaatgggcttctcgtcgtgtgccagcggcttgctaggctcaagagcgtgagtggttttccaggtcagtaccgcaaggaagatgatgattaagataggtaccgtccagaccacagcttccactttattggagtgtgaccagttcgggctgtacttagcatctttattgctcgcacggtacttccaggcgaaaccaacagccatcaagattgcgggaataacgacaatcaacatcaggccaaatgccgtcagtatcagtgaacgttgctccagaccaatctgtcctttgggatctaacagcgcagaattacagccactgagcaatacagtgcctgcaaataatgacaaccatcccaaacttttattgtatttcctgagtctcatttaacgacctcaattccacgggatctggtggcgtttaaagtgtgtgggcattttacgggaaggttacattactgtaaacatgattaaattcctgttacttggatttggctgtcaggtcacatatgttgcaaaacatatcaagttgattttaagaagctgttgcaaaagggcgttataacgaaaggggagtgcagaaggagtttgggcgggcaattggtataatcaatataaaataaaacaattatttaacaaataattatcattgaggtgacaactgggtggtgagaaaataaggactcattagctgaatcgtgtaagaaaaatagaattcataaattgcgtcaataatttccaaacgctaagccgcacaaaagaacaaatattaataagcgatgctgatgtttatttagccgtaataattacggcgagtgattactacagctaaataatattacagattacatcagatgtgtttttcgtagcgccagataatccagcaaaccaccaagcacaacgccagaaagggcgactaaaaccccgacttccagcagcgcaggcaggaaagagaagtgcgtcaaatccagcgcgtccattgtcaacagcagtaaccacacggccaacaggctgatgcccgccgccagtgtccacatggcaaaggcataacctgcaggatattcggtacgggagataaagttgtcatttactcgtgtatattcaagcgtctggcggcaaaccagcagcaaaataagccctggtacggcagcggcgacggagaatagatagaatgtcgaccagccgtgtgcttcaacaaaccaacccgccacggggccgacataaactcgccctacagcagaaagcgctgagagcagggcaaattgagtagcggaaaatgacttattacacagcgtcattaacagcgcgacaaaggctgatgtacccatcccgccacagaggttttcgaaaaagacggctgcacccatgctgtagagatgcttatcagtaatcgacagcagccagtaaccggcgttagatgcaccttgtaaaatgccgaaaatcagcagtgcacggaacagcgacaggcgctgcatcaaaatcccaccgtacaatgcgccaacaatggtcgccagtaagccaagcgttttgttaaccacgcctacttcacccgcatcaaacccgacgccgcgaatcaaaaacgtggttgtcaggctcatagcgaatgcgtcgcccagcttatacagcacgataagaagcaaaataagccaggcattattgcgaccaaagaaatctcgcagaggtgcaacaaccgcttgttccagcgttttgggcacaggaatggtgtcggtgggttctggtgcaagcaacgtcgcgataatacaggggatcaacagcgccgccatcaaccagtacatgccctgccagcccagccatttatctgccagccacagggctaagccgccggaaaccagcatccctaaacggtaacccagcacgctgattgccgcgcccgcaccacgttcttctgccgggagcacatcggttttccacgcatcgaagacaatatcctgggaggcagagcaaaaagcgatcaccaccgccagtgccgccatccagcggagctgggtgcctggttcgagaaaacccatcgccgcaatggcgactaataacagaatttgcgtggcgagcagccaaccgcgccgccgcccgaaaaatgggggcgtgtagcggtccatcagtggtgaccagaggaatttaaaaacgtaagcctggcctaccagagagaagaaaccaatggttttgagatcgatattctcgaccgtcatccaggcctgtaaggtgccggacgtcagggcgagcggtagcccggaagcaaaacccaggatcagcaatatggctgaacgcggctgttgaaaaatacgtaaatattgactggacatgggtgtctacaggcccggcttgcaccgggccagagggcagaaattaacgcgcgttctgcttgatgaattcgtggatgctggtgtcctgagacatatcagcgatggtatcggtcagcacactgttaaccgcatcggcgatatttttgttggaggcctggaatgcaccttcaacgttgtagctggcacgatagtttttggtcattttgttgccattctgcgcggtagcgatgatggcgatatccgctttggtcgcgatgttgtagcgcacgttgccctgggacacgtcagcatacagttggctaacgatgatttgcagattaaccgggccattcggaccaaccatgtatccacgggcggtcatctgtttttccagcacttcttgcagcaggaaacgcagatcgcgggaggcggtcagggtaacgatttgattatcgcgggtgacttttgccagcgcctgatcggtacgctgatcggcaccattaatgcttacggtgacgcccatcaggcttggatcctgctgtggcagtgtaatcgtcggggaaacttcgatagttgttggcggttttgcgcatcctgcaagcataaacagagcaactaacgggaagaggatttttttgaacatgttcgggctctcagagactcttaagcgtgtttggtaaaaattcccgccatcataacattgccaacggcgaggggaagtgggtaaggcatgtaaattcatcatgttgacgaaataatcgcccctggtaaaagaaacgctgatgcgaggcctgtgtttcaatctttaaatcagtaaacttcatacgcttgacggaaaaaccaggacgaaacctaaatatttgttgttaagctgcaatggaaacggtaaaagcggctagtatttaaagggatggatgacatctcagcgttgtcggaggagatatttcatgatgatacgtgagcggatagaagaaaaattaagggcggcgttccaacccgtattcctcgaagtagtggatgaaagctatcgtcacaatgtcccagccggctctgaaagccattttaaagttgtgctggtcagcgatcgttttacgggtgaacgttttctgaatcgtcatcgaatgatttacagtactttagcggaggaactctctactaccgttcatgcgctggctctgcatacttacactattaaggagtgggaagggttgcaggacaccgtctttgcctctcctccctgtcgtggagcaggaagcatcgcgtaaaaacgcatttgcaactgtcggcgcttttccagtatgttgctaaagattttatgaaaaacggcctgcgggccgttttgttttgtctggattttgcgctttttgcccagcattcagacgaaaatcgcccgggaattgtgaaaaaatacgcgacagcgcgcaataaccgttctcgactcataaaagtgatgccgctataatgccgcgtcctatttgaatgctttcgggatgattctggtaacagggaatgtgattgattataagaacatcccggttccgcgaagccaacaacctgtgcttgcggggtaagagttgaccgagcactgtgattttttgaggtaacaagatgcaagtttcagttgaaaccactcaaggccttggccgccgtgtaacgattactatcgctgctgacagcatcgagaccgctgttaaaagcgagctggtcaacgttgcgaaaaaagtacgtattgacggcttccgcaaaggcaaagtgccaatgaatatcgttgctcagcgttatggcgcgtctgtacgccaggacgtcctgggcgacctgatgagccgtaacttcattgacgccatcattaaagaaaaaatcaatccggctggcgcaccgacctatgttccgggcgaatacaagctgggtgaagacttcacctactctgtagagtttgaagtttatccggaagttgaactgcagggtctggaagcgatcgaagttgaaaaaccgatcgttgaagtgaccgacgctgacgttgacggcatgctggatactctgcgtaaacagcaggcaacctggaaagaaaaagacggcgctgttgaagcagaagaccgtgtgaccatcgacttcaccggttctgttgacggcgaagagttcgaaggcggtaaagcgtctgatttcgtactggcgatgggtcagggtcgtatgatcccgggctttgaagacggtatcaaaggccacaaagctggcgaagagttcaccatcgacgtgaccttcccggaagagtaccacgcagaaaacctgaaaggtaaagcagcgaaattcgctatcaacctgaagaaagttgaagagcgtgaactgccggaactgactgaagaattcatcaaacgtttcggcgttgaagatggttccgtagaaggtctgcgcgctgaagtgcgtaaaaacatggagcgcgagctgaagagcgccatccgtaaccgcgttaagtctcaggcgatcgaaggtctggtaaaagctaacgacatcgacgtaccggctgcgctgatcgacagcgaaatcgacgttctgcgtcgccaggctgcacagcgtttcggtggcaacgaaaaacaagctctggaactgccgcgcgaactgttcgaagaacaggctaaacgccgcgtagttgttggcctgctgctgggcgaagttatccgcaccaacgagctgaaagctgacgaagagcgcgtgaaaggcctgatcgaagagatggcttctgcgtacgaagatccgaaagaagttatcgagttctacagcaaaaacaaagaactgatggacaacatgcgcaatgttgctctggaagaacaggctgttgaagctgtactggcgaaagcgaaagtgactgaaaaagaaaccactttcaacgagctgatgaaccagcaggcgtaatttacgtagcataacgcgctaaattcgcacaaaggcccgtcaccgccaggtggtgggcttttttttgtcatgaattttgcatggaaccgtgcgaaaagcctctttcggtgttagcgtaacaacaaaagattgttatgcttgaaatatggtgatgccgtacccataacacagggactagctgataatccgtccataaggttacaatcggtacagcaggttttttcaattttatccaggagacggaaatgtcatacagcggcgaacgagataactttgcaccccatatggcgctggtgccgatggtcattgaacagacctcacgaggtgagcgctcttttgatatctattctcgtctacttaaggaacgcgtcatttttctgactggccaggttgaagatcacatggctaacctgattgtggcgcagatgctgttcctggaagcagaaaacccagaaaaagatatctatctgtacattaactctccaggcggggtgattactgccgggatgtctatctatgacaccatgcagtttatcaagcctgatgtcagcaccatctgtatgggccaggcggcctcgatgggtgctttcttgctgactgcaggggcaaaaggtaaacgtttctgcctgccgaattcgcgcgtgatgattcaccagccgttgggcggctaccagggccaggcgaccgatatcgaaattcatgcccgtgaaattctgaaagttaaagggcgcatgaatgaacttatggcgcttcatacgggtcaatcattagaacagattgaacgtgataccgagcgcgatcgcttcctttctgcccctgaagcggtggaatacggtctggtcgattcgattctgacccatcgtaattgatgccagaggcgcaactgtgccgctatacttatccagggcggcacaacgctgtaagcggcttgcgcctgagaatggcatttgcgtcgtcgtgtgcggcacaaagaacaaagaagaggttttgacccatgacagataaacgcaaagatggctcaggcaaattgctgtattgctctttttgcggcaaaagccagcatgaagtgcgcaagctgattgccggtccatccgtgtatatctgcgacgaatgtgttgatttatgtaacgacatcattcgcgaagagattaaagaagttgcaccgcatcgtgaacgcagtgcgctaccgacgccgcatgaaattcgcaaccacctggacgattacgttatcggtcaggaacaggcgaaaaaagtgctggcggtcgcggtatacaaccactacaaacgtctgcgcaacggagataccagcaatggcgtcgagttgggcaaaagtaacattctgctgatcggtccgaccggttccggtaaaacgctgctggccgaaacgctggcgcgcctgctggacgttccgttcaccatggctgacgcaaccacgctgaccgaagccggttatgtgggcgaagacgttgaaaacatcattcagaagctgttgcagaagtgcgattacgacgtacagaaagcgcagcgcgggattgtctacatcgatgaaattgacaagatttctcgtaagtcagacaacccgtccattacccgagacgtttccggtgaaggcgtacagcaggcactgttgaaactgatcgaaggtacggtagctgctgttccgccgcaaggtgggcgtaaacatccgcaacaggaattcttgcaggttgatacctctaagatcctgtttatctgtggcggtgcgtttgccggtctggataaagtgatttcccatcgtgtagaaaccggttccggcattggttttggcgcgacggtaaaagcgaagtccgacaaagcaagcgaaggcgagctgctggcgcaggttgaaccggaagatctgatcaagtttggtctgatccctgagttcattggtcgtctgccggttgtcgcaacgttgaatgaactgagcgaagaagctctgattcagatcctcaaagagccgaaaaacgccctgaccaagcagtatcaggcgctgtttaatctggaaggcgtggatctggaattccgtgacgaggcgctggatgctatcgctaagaaagcgatggcgcgtaaaaccggtgcccgtggtctgcgttccatcgtagaagccgcactgctcgataccatgtacgatctgccgtccatggaagatgtcgaaaaagtggttatcgacgagtcggtaattgatggtcaaagcaaaccgttgctgatttatggtaagccggaagcgcaacaggcatctggtgaataattaaccattcccatacaattagttaaccaaaaaggggggattttatctcccctttaatttttcctctattctcggcgttgaatgtgggggaaacatccccatatactgacgtacatgttaatagatggcgtgaagcacagtcgtgtcatctgattacctggcggaaattaaactaagagagagctctatgaatcctgagcgttctgaacgcattgaaatccccgtattgccgctgcgcgatgtggtggtttatccgcacatggtcatccccttatttgtcgggcgggaaaaatccatccgttgtctggaagcggcgatggaccatgataaaaaaattatgctggtcgcgcagaaagaagcttcaacggatgagccgggtgtaaacgatcttttcactgtcgggaccgtggcctctatattgcagatgctgaaactgcctgacggcaccgtcaaagtgctggtcgaggggttacagcgcgcgcgtatttctgcgctctctgacaatggcgaacacttttctgcgaaggcggagtatctggagtcgccgaccattgatgagcgggaacaggaagtgctggtgcgtactgcaatcagccagttcgaaggctacatcaagctaaacaaaaaaatcccaccagaagtgctgacgtcgctgaatagcatcgacgatccggcgcgtctggcggataccattgctgcacatatgccgctgaaactggctgacaaacagtccgttctggagatgtccgacgttaacgaacgtctggaatatctgatggcaatgatggaatcggaaatcgatctgctgcaggttgagaaacgcattcgcaaccgcgttaaaaagcagatggagaaatcccagcgtgagtactatctgaacgagcaaatgaaagctattcagaaagaactcggtgaaatggacgacgcgccggacgaaaacgaagccctgaagcgcaaaatcgacgcggcgaagatgccgaaagaggcaaaagagaaagcggaagcagagctgcagaagctgaaaatgatgtctccgatgtcggcagaagcgaccgtagtgcgtggatatatcgactggatggtacaggtgccgtggaatgcgcgtagcaaggtcaaaaaagacctgcgtcaggcgcaggaaatccttgataccgaccattatggtctggagcgcgtgaaagatcgtatccttgagtatcttgcggttcaaagccgtgtcaacaaaatcaagggaccgatcctctgcttggtagggccgccgggggtaggtaaaacctccctgggtcagtccatcgccaaagccaccgggcgtaaatatgtccgtatggcgctgggcggcgtgcgtgatgaagcggaaatccgtggtcaccgccgtacttacatcggttctatgccgggtaaactgatccagaaaatggcgaaagtgggcgtgaaaaacccgctgttcctgctcgatgagatcgacaaaatgtcttctgacatgcgtggcgatccggcctccgcactgcttgaagtgctggatccagagcagaacgtagcgttcagcgaccactacctggaagtggattacgatctcagcgacgtaatgtttgtcgctacgtcgaactccatgaacattccggcaccgctgctggatcgtatggaagtgattcgcctctccggttataccgaagatgaaaaactgaacatcgccaaacgtcacctgctgccgaagcagattgaacgtaatgcactgaaaaaaggtgagctgaccgtcgacgatagcgccattatcggcattattcgttactacacccgtgaggcgggcgtgcgtggtctggagcgtgaaatctccaaactgtgtcgcaaagcggttaagcagttactgctcgataagtcattaaaacatatcgaaattaacggagataacctgcatgactacctcggtgttcagcgtttcgactatgggcgcgcggataacgaaaaccgtgtcggccaggtaaccggtctggcgtggacggaagtgggcggtgacttgctgaccattgaaaccgcgtgcgttccggggaaaggtaaactgacctataccggttcgctcggcgaagtgatgcaggagtctattcaggcggcgttaacagtggttcgtgcgcgtgcggaaaaactggggatcaaccctgatttttacgaaaaacgtgacatccacgtccacgtaccggaaggtgcgacgccgaaagatggtccgagtgccggtattgccatgtgcaccgcgctggtttcttgcctgaccggtaacccggttcgtgccgatgtggcaatgaccggtgagatcactctgcgtggtcaggtactgccgatcggtggtttgaaagaaaaactactggcagcgcatcgcggcgggattaaaacagtgttaattccgttcgaaaataaacgcgatctggaagagattcctgacaacgtaattgccgatctggacattcatcctgtgaagcgcattgaggaagttctgactctggcgctacaaaatgaaccgtctggcatgcaggttgtgactgcaaaatagtgacctcgcgcaaaatgcactaataaaaacagggctggcaggctaattcgggcttgccagcctttttttgtctcgctaagttagatggcggatcgggcttgcccttattaaggggtgttgtaaggggatggctggcctgatataactgctgcgcgttcgtaccttgaaggattcaagtgcgatataaattataaagaggaagagaagagtgaataaatctcaattgatcgacaagattgctgcaggggctgatatctctaaagctgcggctggccgtgcgttagatgctattattgcttccgtaactgaatctctgaaagaaggggatgatgtagcactggtaggttttggtacttttgccgttaaagagcgtgctgcccgtactggccgcaacccgcagaccggtaaagagatcaccatcgctgctgctaaagtaccgagcttccgtgcaggtaaagcactgaaagacgcggtaaactaagcgttgtccccagtggggatgtgacgaagttcaagggcgcatctactgatgtgccttttttatttgtattcggtgactttctgcgtcttgtgggctgacaattgcccccgtttcttgtcacaataggcctttgcgcgcatcgatacgttgcgtgaggtacacagtcatctacagcggagtgttgttacaccatgatggacagcttacgcacggctgcaaacagtctcgtgctcaagattattttcggtatcattatcgtgtcgttcatattgaccggcgtgagtggttacctgattggcggaggcaataactacgccgcaaaagtgaatgaccaggaaatcagccgtgggcaattcgagaacgccttcaacagcgagcgtaatcgcatgcagcaacagctgggcgatcaatactccgagctggcagcgaacgaaggctatatgaaaaccctgcgtcaacaggtgctgaatcgtctgatcgacgaggcgcttctggatcagtacgctcgtgagctgaaactgggtatcagcgatgagcaggttaaacaggcgattttcgcgaccccagccttccaggttgacggcaaatttgataacagccgctataacggtatcctcaaccagatggggatgaccgccgatcagtacgcccaggcgctgcgtaaccagctcactacccaacagctgattaacggcgttgccggtaccgattttatgctgaaaggtgaaaccgacgagctggcggcactggtagctcaacaacgcgtggtgcgtgaagcgactatcgatgttaacgcgctggcggcgaagcagcctgtgaccgaacaggaaattgccagctactacgaacaaaacaaaaacaatttcatgacgccggaacaattccgcgtgagttacatcaagctggatgccgcgacgatgcagcaaccggttagcgatgcggatatccagagctactacgatcagcatcaggatcaattcacccagccgcagcgtacccgttacagcatcatccagaccaaaactgaagatgaagcgaaagcggtacttgatgagctgaataagggcggtgattttgctgcattagccaaagaaaaatctgccgatattatctctgcccgcaacggcggtgatatgggttggttagaagatgccactatcccggacgaactgaaaaatgctggtctgaaagaaaaaggccaactgtctggtgttatcaaatcttcggtcggtttcctgattgtgcgtctggacgacattcagccagcgaaagtgaaatcgttagacgaagtacgtgacgacattgcggcgaaagtgaaacacgaaaaagccctcgatgcgtactacgcgctgcagcagaaagtgagcgatgcggcaagcaacgacaccgagtctctggccggtgcagagcaagctgccggcgttaaagccactcagacgggttggttcagcaaagataacctgccggaagagttgaacttcaagccagttgccgacgctatcttcaacggcggtctggtaggtgaaaacggcgcgccgggcatcaactctgacatcatcaccgtagacggcgaccgcgcattcgtgctgcgcatcagcgagcacaaaccggaagcggtgaaaccgttggcagatgttcaggaacaagttaaggcactggttcagcacaacaaagctgaacaacaggcgaaagtggatgctgagaaactgctggttgatttgaaagccggcaaaggtgcggaagctatgcaggctgccggtctgaaatttggcgagccgaaaaccttaagccgttccggtcgtgacccgattagccaggctgcgtttgcactgccactgccagcgaaagacaaaccgagctacggtatggcgaccgatatgcaaggtaatgtggttctgctggcgctggatgaagtgaaacaaggttcaatgccggaagatcagaaaaaagcgatggtgcagggtatcacccagaacaacgcacaaatcgtctttgaagctctgatgagtaacctgcgtaaagaggcgaaaatcaaaattggcgatgcgctggaacagcaataatcctgaagccgcctcgcaaaaaaatgctttgcagctgtaacaagaaaaggtcgctttcgcggccttttccatttctgaacattgccatttgtttactgttttcactgccgttaaggtgattccactgttaacaaacaaggagaaaacagtatgaaacacggaattaaagcactgctcattaccctgtccctggcctgtgccggaatgtctcatagcgcgctggcggcagcttctgtggcgaaaccgacaacagtagaaaccaaagcggaagctcctgcagcacaaagtaaagcagcagtaccggcgaaagccagtgacgaagaaggcacccgggtcagcattaataatgccagcgcggaagagttagcccgcgcgatgaatggcgttggcctgaagaaagcgcaggcgattgtcagttatcgcgaagagtacggtccgtttaaaacggtggaggatctaaagcaggtgccggggatgggcaattcgctggtggaacgtaatctggcggtattaaccctgtaattaatttgcatagtggcaattttttgccagactgaagaggtcataccagttatgacctctgtacttataacagttcttataacaacaacgtaaggttattgcgctatgcaaacacaaatcaaagttcgtggatatcatctcgacgtttaccagcacgtaaacaacgcccgctaccttgaatttctcgaagaagcccgctggcatgggttggaaaatagcgacagttttcactggatgacggcccataacatcgccttcgtcgtggtcaatatcaatattaactatcgccgcccggcggtattaagcgacctgttaaccattaccagtcagttgcagcaattaaacggtaaaagtggcatcttaagccaggtcattacactggagccggaaggacaggtggtagcggatgcgcttattacgtttgtttgtattgatcttaaaacgcagaaagcattagctctggaaggggaattgcgcgaaaagctggagcagatggttaagtaaacgttttgtggtgccggatgctcaagccgcatccggcgacacccggaataattacttcaacccggttttctgcttcatcgctgccatcaccgtcggtttatcggccagataatgattcaaaccgttggcacgtaaattacacgccgcacaatgaccgcaaccgtcgcctttaatgccgttataacaggtcagcgtttcgttacggactaaatccagcttgccgtaataatctgccagcgcccaggtttccgctttatcaatccacatcagcggcgtttcaaaacgaatatctttcgccatgcccaaactgacggcatggtttagtgctttcacaaactcatcgcggcaatccgggtagccggagaaatccgtttcgcagacgccggtaattacggcttctgcttttacctgatacgcatatattgccgccagtgtcaggaacaaaatattacgccctgggacaaacgtattcgggataccatcggcttcaggttcataatcaggcaccggaatgctgtcacgcgtcaggctgctgaccgccagctcgttgagcagcgttacatcaagcaccttatgcgcgcgtgcccccagtttcagcgccagttcgcgtgccacgtcgatttctgcgcgatggcgttgaccgtaatcgaacgtcacgcaatggacttcatcatattgttgtaatgcctgcaccagacaggtggtggaatcctggcctccactgaacacaacgacagcacgtttcatagataatcctgcttgaacaataaaaacgttatggtaacgcctgcgattaacccggaccagctattcattgcgacggcgcgggaagccaggcttcggtaaattcaaaccagccgcgcggtgtcagtcgcacaccgttcacgccgggaggggcgctaatgcgatagtgatagttgaacagcggcgtcagcgtcgcatctgccattaactggctaaaaaccgctttcagggcattaaatcggttttcctcatcaggcattacttgcactgcgtccagtgtcgattgcaaatgtgcatatgctggagcgtcgaaaacatgtggccacagtggatcgcaacgcagccattgctccagggtatattccggtgcttcgccaattaatctgtcgcccatcatgaggtctgcgtgtgccagtagggtcgtgtcgtcccagttttttgcgttatgaaaaataattgtgagttcacagccttccgctgccagtgtcgcctgtaggcgttctgccatggtatgaagttctatcggtaggtgataaaccagcgtcaaggttttcggtagtttaacttcatccggtacttgccaatgcggaatagtccagcctggcagtaatgcatgactggcagtgatcaggttttctccgacttctaacgtttgtaataaaccggattgatgaataatggagattacttttcgcgcctgccagagggacagtcggagacttttgcgcaatgttaaatagcaaaaacctaaactgatgccgctactgacctggctgacccgttgcagctcctccggtttgccaatggtgatttgcacgggatgccgacaactggttcccatatctttttcgaaaagcggcggagttatccagtactcaaccgctttaagcagcggatgacgtaaatggtaataatcatggctctccaggcgcaccagttccgctgtgaattgtgttaagcgaaaaggacctgtgccgatcagtgggaattgcggatgcgccagatggctgcaatagctcgccagtcggtgcgcaagccagtaatcggggcgatgtaaaaagaaggtcagacactgcggatgggtgacttcaatacgcttcacgctaataaataattgatccagtgctggcagttgtaacagcatcaataaccgctggtgtaagtgggaggcttttactgcatcgccgttatgccagtgtaaggttgagcgaagataaaaatcccagcgtaacccgtcagtagaggtttcccagtgatgcgctaaatcgccaatcgggcgctgggtattattatcgaagcgggtcaggccggaaaatatctgcccggccagatgctgctcggcacggccgggcaaaaagcccggttgtagcggttcgagcgggcgatagtagggaatacgcaacgtgggcgtatcgttttgccattgtccgcccataaacggctgtaacagagtgcgcaactcacctggggccagttgcgccagctccagcacatcttgctgctttccggtttccagcgcctgttccatcatcgcattgcgtagcgattctggcgtgaccagaaagcgcagttgaccgcgctttccgcgtcctgactgcgcctgccactccagccatcccgcctcctgtgcctggcgtaacagcgtacgaacatggcgttcgctgcaaaaacagcgttcggccagttcgctgacggtgacggtttgcggctttccggcggaaggttgccacagacgttgatactggttaagacggttgagcagtcgcatataaacccggaacaatattatttaactattcactattacttccgtatatatcaggtgatactcaatcaccattaaccgtgtcacagagtggagaaagaaatggctcgtctggcagcatttgatatggatggcactttattgatgcctgaccatcatttaggtgagaaaaccctctctactttggcgcggctgcgtgaacgcgacattaccctcacttttgccacggggcgtcatgcgctggagatgcagcatattctcggggcgctatcgctggatgcatatttgattaccggcaacggaacgcgcgtgcattctctggaaggtgaacttttacatcgtgatgatttacctgcggatgtcgcggagctggtgctgtatcagcaatgggatacccgagccagcatgcatatcttcaatgacgatggttggtttaccgggaaagagaaccctgcgttgttgcaggcatttgtctatagcggttttcgttatcagataatcgatgtcaaaaaaatgccactcggcagcgtcaccaagatctgcttctgtggcgatcacgacgatcttacacgcttgcagatccagctatacgaagcattaggcgagcgtgcacatttatgtttttccgccacggattgcctcgaagtgctgccggtgggttgcaataaaggcgctgcattgacggtgctgacccaacatttaggtttatcgttacgcgattgcatggcctttggtgatgcgatgaacgatcgcgaaatgttaggcagcgtcggtagcggatttattatgggcaatgcgatgccgcaactgcgcgcggagctcccgcatttaccggtgattggacattgccgaaatcaggctgtctctcactatttgacgcactggctggactatccacatctaccttattcccccgaataacgagatcccttccagcaccgggcaattgcccggttttttttgcgttgaatttgtcattttgtgccgtgatgcttaaaccgcacagaataaattgtcgcgatttcacctttaaaatagaattaaaagagaaaaaaattctctgtggaagggctatgttagataaaattgaccgtaagctgctggccttgctacagcaggattgcaccctctctttgcaggcactggctgaagccgttaatctgacaaccaccccctgctggaagcgtctgaaacggctggaggacgacggtatccttatcggcaaagtcgccctgctggatccggaaaaaataggcctcggcctgaccgcctttgtgctgataaaaacgcaacatcacagcagcgaatggtattgccgctttgtcacggtggttaccgaaatgccagaagtgctggggttctggcgcatggctggtgaatacgattatctgatgcgcgtccaggttgccgacatgaaacgctacgacgagttttataagcgtctggtaaacagtgtaccggggctgtcggacgtcacttccagcttcgcgatggaacagattaaatacaccacttctttacccatcgaataaatatccagaatcaagtcaggacacaacgcgtgcgattatttgctcaattaagctggtatttccgtcgggaatggcgtcgctatctcggggctgtcgccttgcttgtcattatcgcgatgctgcaactggttccgccaaaagtggttggtattgttgttgatggcgtgacagaacaacactttactaccgggcagatcctgatgtggatcgccaccatggtgctgattgccgttgtggtttatctcctgcgttacgtctggcgcgtattgctgtttggtgcgtcttatcaactggctgttgaactgcgtgaagattattaccgccagctaagccggcagcatcctgagttttacctgcgtcatcgcacgggtgacctcatggctcgtgcgaccaatgacgtcgatcgcgtcgtgtttgccgccggagaaggggtgctgacgctggtggattcactggtaatgggctgcgctgtgttgattatgatgtctacgcaaattagctggcagttgaccttatttgccctgttgccgatgccagtgatggcgatcatgatcaagcgcaacggcgatgccttgcatgaacgctttaagctggcacaggcggcgttttccagtcttaatgaccgcacccaggaaagcctcaccagtattcgcatgatcaaagcctttggtctggaagatcgtcagtcggcgttatttgccgcggatgccgaagataccggcaaaaaaaacatgcgggtggcgcgtattgatgctcgtttcgacccgaccatctatatcgcgattggtatggcgaacttgctggcgattggcggcggtagttggatggtggtacagggcagtttaacgctgggccagctcaccagttttatgatgtatttaggtctgatgatttggccaatgctggcgctggcatggatgtttaacattgtggaacgtggcagcgcggcgtatagccgaattcgtaccatgctggccgaagcgccagtcgttattgatggtagtgataaggtgccagaaggtcgtggtgaactggatgtgaatattcgccagtttacgtatccgcagactgaccatcctgcgctggaaaacgtcaatttcgccctgaaacccggtcagatggtaggtatttgcgggccgactggttccggcaaaagtaccctgttgtcgctcattcagcgtcatttcgacgtcagcgagggggatatccgctttcatgatattcctctgacgaagttacaactcgatagctggcgtagccgcctggcggtagttagccagacaccgttccttttttccgacaccgtagcgaacaacatcgcgttgggttgcccgaatgccacccagcaagagattgagcatgtcgcgcggttagccagcgtgcatgacgatattttgcgtttaccgcaaggttacgatacagaagtgggcgagcgcggcgtgatgctttccggtgggcaaaaacagcgtatctccattgctcgtgcgttattagtcaacgcggaaatcctcatccttgatgatgcgctttcagcggtggacggacgcacagagcaccagatcctgcataacctgcgtcagtgggggcagggaagaacggtaatcatcagtgcccatcgcctttctgcactgacggaagccagtgaaattattgtgatgcagcacggacatatcgcccagcgtggcaatcatgatgagctggcgcaacaaagtggctggtatcgcgatatgtatcgctatcaacaactggaggcggcgctcgacgacgctccggaaattcgcgaggaggccatcgatgcgtagttttagccaactgtggccgactctcaagcgcctgttagcgtacggttcgccgtggcgtaaaccgttggggattgcggtcctgatgatgtgggttgcggcggcggcagaagtcagtgggccgctgcttatcagctattttatcgacaatatggtagcgaaaaataacctgccgttgaaagtggttgcagggctggctgcggcgtatgttgggctgcaactgtttgccgccgggctacattacgcgcagtcgctgctgtttaatcgggcggcagtaggcgtagtgcaacagttgcgtaccgacgtgatggatgctgcgttacgccagccattaagcgagtttgatacccaacccgtcgggcaggtgatttcccgcgtcactaatgacactgaagtgatccgcgatctctacgttaccgtagtggcaactgtcctgcgtagcgccgcactggtgggcgcgatgctggtggcgatgttcagcctcgactggcgaatggcgctggtggcgataatgattttcccggtggtgctggtggtaatggtgatatatcagcgttacagcacgccgattgtccgtcgtgtgcgcgcttatctggcggatatcaacgacggctttaacgaaatcatcaatggcatgagcgttatccagcagttccgtcagcaggcgcgatttggcgaacgtatgggtgaggccagtcgttcacactatatggcgaggatgcaaaccctgcgcctcgacggttttctgctgcgtccgctgctgagtctgttttcatcgctcattctttgtggcttgttgatgctgtttggtttctccgccagcggcaccattgaagtgggcgtgttgtatgcgttcatcagttatttggggcgacttaacgaacccttaatcgaactgaccacgcagcaggcgatgctgcaacaggctgttgttgctggtgagcgcgtttttgagctgatggacggaccgcgccagcaatatggcaatgatgatcgcccgttgcagagcggcaccatcgaagtcgataacgtgtcatttgcttatcgcgatgacaatctggtgctaaagaacattaatctctctgtgccttcgcgcaactttgtggcgctggtcgggcataccggcagtggcaaaagcaccctcgccagtttattgatgggctattacccgctaacggaaggtgagattcgccttgatggtcgtccattaagttcgctaagtcacagcgcgctgcgccagggcgtggcaatggtgcagcaagatccggtggtgctggcggataccttcctcgccaacgtgacgctggggcgtgatatctccgaagaacgcgtctggcaggcgctggaaaccgtgcaactggcggagctggcgcgtagcatgagcgacggtatttacacgccgcttggcgagcaggggaataatctctcagtcgggcaaaagcaactgctggcactggcacgcgtgttggtggagacgccgcaaatcctgatccttgatgaggcaacagccagcattgactccggtactgaacaggcgattcaacatgctctggcggcggtgcgtgaacatactacgcttgtggtgattgctcaccgcttatcaactattgttgatgccgacaccattctggtgcttcatcgtgggcaagctgtggagcagggcactcaccagcaactgctggcggcccagggacgctactggcagatgtatcaactgcaacttgcgggcgaagagctggcagccagcgtgcgtgaagaggaatcattgagcgcctgaatagcgcaatatttcatcgttggtgcaaaaatgtaacgcactgtgcactgtcatagtgcgttttcattttcaatcttcttaacttcctgctctctttctcgtttttcatttctggcacaccgcttgcaataccttcttcgtgtagcagaaccattaccgaattctgaccggaggggatctatgaagctggtgaccgtgataatcaaaccattcaagctggaagacgttcgtgaagcgttatcttccattggtattcagggcctgaccgtcaccgaagtgaaaggtttcgggcgtcagaaagggcatgccgagctgtaccggggggcggaatacagcgtcaacttcctgccaaaagtaaaaattgatgtggcgattgctgatgaccaactcgatgaagtgatcgatatcgtcagcaaagcggcttacaccggaaaaattggcgacggcaaaatcttcgtcgctgaattgcaacgcgtcattcgtattcgtaccggcgaagccgacgaagcggcgctgtaatctctggcacacagcaacaggaacgaaaaatgaagatagcaacgataaaaactgggcttacttcactggcgatgctgccgggactggtaatggctgcacctgcggtggccgataaagccgacaatgcgtttatgatgatttgtactgcgctggtgctgtttatgaccgttccggggattgccctgttttatggagggctgattcgtggcaaaaacgtgctgtcgatgctgacgcaggtgaccgtgacgtttgcactggtctgtattctctgggtggtttacggctactcgctggcgtttggcgaaggcaacaacttcttcggcaacattaacgggttgatgctgaaaaacattgaactgacggcggtgatgggcagcatttatcagtatatccacgtggcgtttcagggatcgtttgcctgcattaccgtaggcttgatagttggggcgctggcggaacgaatccgcttctcagctgtgttgatttttgtggtggtatggctgacgctctcttacattccgattgcgcatatggtctggggcggcggtttgctggcttctcacggggcactggatttcgcgggtggcacggtggtgcatattaacgccgcaatcgccggtctggtgggcgcgtatctgataggcaaacgcgtgggcttcggtaaagaggcgtttaaaccgcacaacctgccgatggtcttcaccgggactgctattctctatatcggttggtttggctttaacgccgggtcagcgggcacggcgaatgaaatcgcggcactggcatttgtgaatactgtggtcgcaactgcggcggcaattcttggctggatcttcggtgaatgggcgctgcgtggtaagccttcactgctgggagcgtgttctggcgcgattgccggtctggtcggcgtgacgccagcctgtggttacattggggttggcggcgcgttgattatcggcgtggtagctggtctggcgggcttgtggggcgttaccatgctcaaacgcttgctgcgggtggatgatccctgcgatgtcttcggtgtgcacggcgtttgtggtattgtcggctgtatcatgaccgggatttttgccgccagctcgctgggcggtgtgggcttcgctgaaggtgtgacgatgggccatcagttgctggtacagctggaaagcatcgccattacgattgtctggtctggtgtggtggcatttatcggctacaaactggcggatctgacggttggtctgcgtgtaccggaagagcaggagcgagaagggctggacgtcaacagccacggcgagaatgcctataacgcgtaacaagcactgcaaaaaacagccggacggttttcacctccggctatttttttaattgtgattacgcatcaccccttcctgaacggtcgaggcaaccagcacgccgtcctgggtataaaactcaccgcgcacaaagccgcgtgcgctggacgccgaggtgctttccacgctatacagcagccattcattcaaattaaacgggcgatggaaccacatggaatggtcaatggtggcaatctgaatccccggttcgagaaaaccgatgccgtgcggctgtagagctaccggcaggaaattaagatcagaagcataaccgagcagatactgatgaacgcgcagatcatccggcacgctaccatttgcgcggatccacacctgacgatgcggttctgcgacgtgccctttcagtgggttatgaaactccaccggacggacttcaagcggacgatcgctgatgaatttatctttcagcactggcggcagcaggtgcgccagcgattgggcgatttgcgtttctgaaggcaggccatcaggcgctggcgcggacggcattgttttttgatgttcgaaacccgcttctggtgcctggaaagaggcagtcatataaaaaatcggtttgccgttttgaatagcagaaacccggcgggcgctgaagctgttaccgtcacgcagcgtttcgacatcataaataatcggcttcttactatcgccagggcgaagaaagtagctgtgaaaagaatgtaccagccgctcgtcagggacggtctcttttgcagcatacaaggcctgacccacgacctggccgccaaatacctggcgtaaacctaaatcttcactctggccgcgaaagagtccttcctcaattttttccagatttaacaatgtcagtaaattttttagcgcctgactcatataactctccagtaacaaagctgccgcagcaagccaaagtgagttgagtataacgcaaatttgccactggtccgatgggtgcaatggtctgaattacgggctaattacaggcagaaatgcgtgatgtgtgccacacttgttgacgttactattttgttaaccactcttccggcgaggaaagttagcccgctggtgcattgataataaggagaagtgaatgaaactcgtgcacatggccagtggtttagcggttgcgattgcgttggcggcttgcgcagataaaagcgcggatattcagacgccagcaccggctgcaaatacgtctatttcagcaacacaacaacctgctatccagcaaccgaatgtctccggtaccgtttggatccgtcagaaagtcgcactgccgcctgatgccgtgctgaccgtgacactttctgacgcgtcgttagccgatgcgccgtcgaaagtgctggcgcagaaagcggtgcgtaccgaaggtaaacagtcaccattcagctttgttctgccatttaacccggcagatgttcagccgaacgcgcgtattctgttgagtgcggcgattaccgtgaatgacaaactggtatttattaccgataccgttcagccggtgatcaaccagggcggaactaaagccgacctgacattggtgccggtgcagcaaaccgccgtgccggttcaggctagcggtggcgcaacgactaccgtaccttcaacttcaccaacccaggtgaatccgtcttcggcagttccagctccaacgcaatattaagcgaagttaaccctctccgcccggagagggttagtagttccagcgataaagctgcaagtcgatttgcccgcttcccgacaccatcacaccttctgccagtaatgcctgtcgctgacgctgtaaatccggtccggtcagtgaaatggtgccgtggcgattaaccacccggtgccatggcaaggtgctgccttcggggagacgctttaacacaccgcctacctggcgcgcggcgcgcggcgatcccgccagtttcgccacatcaccgtaagtggtgacatagccttcgggaatagcggctacgatttgccagacgcgctggggaaatgaatcttctttttccatcttttcttcctgaggtaatttttcagcataatctggaaaaacgcccgagtgaagccgcattgcgcaagaaaccagcatctggcacgcaatgggttgcaattagccggggcagcagtgataatgcgcctgcgcgttggttctcaacgctctcaatgggggctctgttggttctcccgcaacgctactctgtttaccaggtcaggtccggaaggaagcagccaaggcagatgacgcgtgtgccgggatgtagctggcagggcccccacccatttctgcctcccaccgtttcgtcaaaaaatcccaacatggctaaactttaaccacaactgacgtcgcaagaattgtctggctgcgcagtacgcttcggaggtatgtctgatgaagtatgttgatggttttgttgttgccgttcctgccgataaaaaggatgcctatcgggaaatggccgctaaggccgcgccattatttaaagagttcggtgcgcttcgtattgtcgaatgctgggccagcgatgtaccggatggtaaagtgaccgattttcgtatggcggtgaaagcggaagagaatgaagaagttgtctttagctggattgaatacccttcaaaagaggtccgcgacgctgctaatcaaaagatgatgtcggacccacggatgaaagagttcggcgagtccatgccgtttgacggcaagcgaatgatctatggtggattcgaatcaatcatcgacgagtaggtagcgtgacgggctgtgcggcgtgccgtcagccctaaaattcacaaatgttgctcggcccagcgtaagaaatcctctttcggtaatgccttgctgtagagccagccctgaccgtagtgcacgccatgctggcgtagccactcttcttgtttactggtttcgattccctccgcaaccattttcagtttcagtgtttttgccatttcgatgatatgcggcgtgacatttttatattccagcgcatcaacgaaagatttatcgatcttcagaatgtcgacatccagatcctgtaaatagcttaaacttgaataccctgtaccaaaatcatcgagataaatttcatggcccgcctcccggtagcgagaaattatcggggcgctggttttcggatcggcaaactcgcgttcagtgagttcaagcgcgatctgtctgggattaacctgatagtgattgatcatttcacgcagcaattgcgggattttttccgaggtgagcacggtggattcaagattgatcgaaatatgctgctgaggatgctgacgcagccagtcgcccatatcttcaaagacgcttcttataatcagtagcgtcaatggctcagaaaggcccgtttgctgtgccagcggaataaaactatctggtgacaaccaactaccgtctgtctgcggccagcgcgccagtgcctcagcaccgacaattttgccattggctaaggagacaatcggctgatagtgcacgcaaatatcacgattttcgatagcatcctgcagccgatgatgcggtgactggatacggcgcaaaatacgcagcacaaacatcgctgccagcaggccaatcaccaacccgagcggtaaccaaataaagacttgccgatgccagcctttctgcaacattttcgttgaagcccaggtgatgatcgaaatattcatctccggtaagggcaggatatcgtaaatgattccattattttcgatatgctcaccgggtgttttttgtagcctggtaataattccctgagcaattttatcgctgctggttatgacaacgttatgggcattgccaataatggcggcatcaatttgccatgagctatagggaatgacatcaataaaggaagcagggtcgatcatgacgacataatgtgccgttcccatggcgaccatataacggataatgcctaaatcgctatgcgatgttaaccagacacgataaccatctttcgaaattttacctggctcggggaaggtatcgggcgggctttcatgctccagagacgaacactggggaacgttgttatcgatataaaccacttcctgaatatagcgataactgtaagatacccgacgcatttccatgagatgggcttcgctacaggcagcgccttgccatctttccagctcttgcagcgcatctttcccttgtgtcgccaccttattggcccgaatagcgacgcgggaggaatacgtattcagctcttcaataaatgatgtttctacctgctgatgggccagccagatgcttaagccgacaggcagcaatactgaaagaatcagtactcccgaaataaggctgaccagatgtcgtgttctcaccagcatatccttattaacacagtgtagggaaagtatatctgattgtggaaaaaggctggcaggagataaggaggtagagctggtatttcctgaagtgatgggtggaagcgatcgttgtcatttgaccaggcgtagagctttacgcctggtatgtacccctaacttaagatgttgattcggcgcgagcgagggtaaaaatatcgtaaaaagatagttcacctttacggacgatcattttttgcagttgttctttatgaacatccgtgacacgcggagagttcaagatggcttcaaccagcgcggcaggtacaaagcgcgtgttgtaccattcgccgttatagcaaacgcggaaatccagcacgtcgatatcttcatagcggtagcgtgggtagacatcgaaaaagaagaaaccattaagcaggataaataatacaaccagtagccagacagagcctgaaagcgtttcggactgcaacatcaccgccagggtggcaaaaaaagcaacgtacataccgataaacagccccggatgtttacggataaaactgatactaaagcggggtttgttgtcgcgtttttcgcgggtattcagagactcaatcgtttcggtcagcaggcgttgtatttcggtcatcgtttgccttcgtgatatctgcaactttccagggaacaccctattttaacgtgggaatagtagaggggaagtaacagatttgccacgattttgcataacagttgagaaaagctggttacaattttttaatgattctggctggattaccgcccacgacaacgttgtccgggacatcttttgtgacaactgcacctgaggctaccacgacgttatcaccaatggtcacaccagggttaatgactgcacgtccgccaatccagacgttattaccgatggtgacgggtttccccagttcagcaccgctattacgtgctacagggtcgatgggatgtgttgccgtgtagatatgaacgcctggtgccaacatacagttatcaccaatgcgaatagggcagacatcaagcatcacgcaatcgaagttggcgaaaaaattattgccgagaaaaatgttatagccatagtcacagcgaaacgttggctcaatataagcctctgtcacctgaccgaataaatcagcaagaatttgctggcgtaatgtgtgctcttccgccagggaatgattgtatcggtgaataagccgacgagctcgcaggcgatcgcgagataacgcctcatctgccgagtgatacaactcaccagcaatcatcttttctttttctgtgctcattactgacttccggttgctgaaaatgcggcaacacagtaagacgaaaagtcagtgaagagaacgttcccattacatctgtgtgatgaagatcacatagggtatgtcttcatggcgaaaaaagtgcaaaattcttaataaacagccagttatagctccgaaagtgagttatttattagcgaataaatttccatactgaggaagggatcttgtcgtacagtttattcatggtcaattcggcgaggcggtgatctgcggctgagtaaaataccgccagttcattatctgataattcgtatttatttttctcgataacacgctccagcgtgtcaattgtctggcaacgacgtaaacgcattaaataatcggttttcgttaaaggtttttcggacatacttctacccatggttgtaataattctaacaagataaactcgcaggattctctttcgtcgcattgacaaaacaacggaatagtcgattacctgacttccgccatttctgaagatcctgcatattaataccataactactgaacaacataaaggtgtcatccagatattcgtcgatctgctcaatgagcttattgtcttcattatacttaattttgtaattaagtgcgaaggtcgcaatatgctcaatcagttcattcaactggaggttgatcgccgaggttgggtcgttaacccagccatgattgctttcttcaaggtttgcaaggcagtcatgatacagggtttcacagagaaacttaagctgtgcgatatcatgtcttttgggtgagtattcatccataacgcgtccccttcttagcggttgaactaacggacacctttcgggatggaaaaaacttactgacctggacttgccctctcgtttgttagcttaactataagccactctttgtaggttttcatcgcattattacgaaaaattacaattaggaaggaagcgggacaggactcactttttcatgctagcaccaacccgcagcaggtaaaagcagtttgctcgaactgttcataacatttcagaattatcgccagaagaaattggtgacactaataccaggattgctctgaatatgacgtaataaccgaggaatgaataaagaattaccgcaaataattaagaatagcctctaaatggttatggattattaaatctattagcgctacttaatataaattaactaacaatcagtattttttatgaattttatacgtggttaatactggttttcgtatgagatcctgagttggtggttcaatactccttaatgttcgtaggttatgcataaaaaaggccgcttgcgcggccttagtgattacacgttgtatcaatgatgatcgacagtatggctgtgctcgatatcttcattcttgcggctaaagcggcggcgaaccaccacaaagaataccggaacgaagaagattgccagtaccgttgcggtcaccatcccgcccattacaccggtacctactgcgttctgcgcgccggaaccagcaccagtactgataaccagcggcataacgccgaggataaacgccaacgaggtcatcaggattgggcgtaaacgcatccgcaccgcatcaagcgtcgcttcaatcagacctttaccttctttatccatcaagtctttggcgaattcgacgataagtatcgcgttcttcgccgacaaaccaatggttgtgagcaggcctacctggaagtaaacgtcattggtcaggccacggaaggtggcagccagcaacgcaccgataacccccagcggaacgactagcataacggagaacggaatcgaccagctctcgtacagcgcagccagacacaggaacacgacaatcaacgaaatcgcgtacagtgaaggtgcctggttgccggagagacgttcctgataggacattcccgtccagtcatagccaacaccggtaggcagtttgctcgccagttgttccatcagctccattgcttcaccggtacttttacccggtgccgcctggcctaagatttccatagatggcaggccgttgtaacgttccagacgcggcgaaccgtactcccaacgagaagaggagaacgccgagaacggcaccatctgaccatcagcagcacgaacataccagtcgccgatatcatccggcagcatacggtatttcgcttctgacatgacgtaaactttcttcacacgaccgcggtcgataaagtcgttcacatagctaccgccccatgcagcgcccagagtggtgttaatgtcgttgatagaaacacccagcgcctgcgctttttcctggtcgatatcaatcttaaactgcggggtatcttccagaccgtttggacgtacgctggtcaacatatcagggtgcttcgctgcttctgcaagcaactggttacgcgcctgagtcagtttttcgtgaccaaggcctgcctggtcaatcagctcaaagtcaaagccggttgcggtacccagttccacgattgcgggcaggttaaaggcgaaaaccatcgcatctttgatttgcgagaaagcacgtgttgcacgcatggtaatcgcttcaactttgttttcttcgcccggacgatcggcccagtccttcaaggaaacgaacgcaataccggtattctgaccacgtcccgcaaagccgaagccgttaacggcgaacaccgactcaacgttgttcttttctttggtcagatagtaattcgttacctcattgagcactttctgcgtacgttcctgcgttgcacctgctggcagctgaaccatggtcataaatacgccctggtcctcatctggcaagaaggagcttggcagacgcacgaacagataggccataccgaccacgatgatcagatacagcaccaggtaacgccccgtactgcgcagaataccgcctacgctgtcggtgtagtggtgcgtgctcttctcgaacatgcggttaaaccagccgaagaagccttttttaccttccccgtgatcgcctttggcaatcggtttcagcatggtggcacaaagagccggagtcaggatcaacgccaccagtaccgacagcgccattgctgaaacaatggtaatagagaactgacgatagatagcaccagtagaaccgccaaagaaggccatcggtacgaataccgccgacagtaccatcgcgataccgaccagagcgccctgaatctgccccatcgacttacgggtggcttcttttggcggcaaaccttcttccgccatcacacgctcaacgttttctaccacaacgatggcgtcatccaccaacaggccgatggcgagcaccatcccgaacattgttagcgtgtttatcgagaagccaaaggcggcaaggacggcaaaggtcccgagcaataccaccggtacggcaatggtcggaatcaacgtcgcgcggaagttctgcaagaacagatacattaccaggaacacgaggatgatcgcttcgaccagcgttttaaccacttcgtgaatagagattttcacgaacggtgtggtgtcatacgggtaaacaattttcagacccgacgggaagaacggttccatcttcgccagttcagcacggattgccgcagcggtatccagcgcgttcgcaccggtcgccagcttgatccccagaccggaagccggttggccgttaaactctgcgatgatgtcgtagttctcaccacccagctcaattttcgccacatcacgcagtagcacgcgggaaccatcctgattcactttcagcaggattttgccgaactcttcagtagaggtcagacgcgtctgagcaataatagaggcgttaagctgttggcctttcaccggcggcgtaccaccgagctgaccagctgcaacctgagcgttctgtgctttgatggcggtaatgacatcaaccggcgttagctggaatttgttcagttcattcgggttcatccagatacgcatcgcgtactgtgaaccgaacaactgaacgtcacccacgcccgacgtacggctgatggcatctttcatattcgctgccacgtagtcagagatatcctcctgcgtcatagtgccatcggtgttgataaccccgacaaccatcaggaagctgctggatgatttctcaacgctcaccccttgctgctgaacttcttgcggcagcaacggcatcgccagctgcagtttgttctgcacctgaacctgcgcgatatccgcatcagtaccagactcaaaggtcagggtgatctgcacggtacccgtggagtcactgttagaggacatgtacatcaggttatcgataccgttcatattctgttcgataacctgtgtcaccgtgtcctgcactgttttcgcatcagcgccagggtaggaggcggagatcgttactgccggcggtgcaatcgtaggatattgcgccaccggcagtttgaggatcgccagcccccctgccaacatgatgataatggcgatcacccacgcaaaaatcgggcgatcgataaagaaattaggcatgtcttaacggctcctgtttaagttaagacttggactgttcaggctgagcaccgcttgcggcttgctggttattatcagcggtaacttcttgtgcttttacctggacaccaggacgcactttctgcagcccacttattactacgcgatcgcctgctttcagaccttctgtcaccagccacttatcgccgatagcctggcttgcaacgatcggacgggtttccactttgtcatccgcgccaaccaccagtacggtggcatcgccacgcggcgtacgggttacgccctgttgcgggactaaaatagcgtttggattaagcccttcttccagacgtgcacgcacgaacatacccggcagcagagtgtgatccgggttcgggaagatagcgcgtagggtgatagacccagtggtctgatcaacggtaacgtcagagaattccagcgtaccgtcctgcgggaacttaatgccgtcactggtgatcagcgacactttggctttgccgttctcttgtttcagcgtgccattcgccagttcctgtttcaggcgcaggaagtcgttgctggactgggtcacatcaacgtagatcggatcaagttgctgcacggttgccagcgcagtcgcctgaccgttctgtaccaatgcgccttccgtcacgtttgacttaccaatgcgaccactaatcggagaggtaactttggtgtaagccagattgattcgcgcagtttcaacggcagctttcgccgcagttaccgcagcattcgcctgttgcgcatcagccagagcctgatcgtactcttgcttactgatgtactgagtaccgagcaatttctgataacgattcaccgtcaattgcgcgatattggctgcagcctgggctttcgccagatcacctttcgcactgtcgtatgccgcctgataggtcgcaggatcaatctgatagagagagacacctgcttcgatgtcgctaccttctttgaaattacgcttcaggataatcccgctaacttgaggacgaacttctgcgatccggtaggcactggtgcgacccggaagctcggttgtgatctgcagaggttcagttttgactgttactacgccaacggcgggcatctgctggccaccttgttgggcctgtttgtcgtcacatcctgttagggctaagctgcctgagagcatcagaacgaccgccagaggcgtaaaccctctgtttttgttcatatgtaaacctcgagtgtccgatttcaaattggtcaatggtcaaaagttaataaacccattgctgcgtttatattatcgtcgtgctatggtacatacattcacaaatgtatgtaaatctaacgcctgtaaattcacgaacatatggcacgaaaaaccaaacaagaagcgcaagaaacgcgccaacacatcctcgatgtggctctacgtcttttctcacagcagggggtatcatccacctcgctgggtgagattgcaaaagcagctggcgttacgcgcggtgcaatctactggcattttaaagacaagtcggatttgttcagtgagatctgggaactgtcagaatccaatattggtgaactcgagcttgagtatcaggcaaaattccctggcgatccactctcagtattaagagagatattaattcatgttcttgagtccacggtgacagaagaacggcgtcgattattgatggagattatattccacaaatgcgaatttgtcggagaaatggctgttgtgcaacaggcacaacgtaatctctgtctggaaagttatgaccgtatagaacaaacgttaaaacattgtattgaagcgaaaatgttgcctgcggatttaatgacgcgtcgcgcagcaattattatgcgcggctatatttccggcctgatggaaaactggctctttgccccgcaatcttttgatcttaaaaaagaagcccgcgattacgtcgccatcttactggagatgtatctcctgtgccccacgcttcgtaaccctgccactaacgaataaccctgaatctgactccaggaattttcctggacattttcgtcgttgctattctggttcactgcgtcgtgatattcttgcggtttgactttttcaggtcgttcttcaggttcagaaaccttcattcatcatgactatgttccagtattacaaacgatcacggcattttgttttttcagcatttattgcttttgtttttgtcttgttatgccagaacacggcgtttgcacgggcgtcatcgaatggtgatttaccgacaaaagcggacctgcaggcacaacttgactcactgaataaacaaaaagatctttctgctcaggacaaactggtgcagcaggatctgacagatacattagccaccctcgataaaatcgatcgcgtaaaagaagagacagttcagctacggcaaaaagtcgctgaagcgccggaaaaaatgcgccaggcgacagcggcgttaacagcacttagtgatgtcgataacgacgaagaaacgcgcaaaattctgagcacgctttcgttgcgccagctggaaactcgcgttgcccaggcgctggacgatttgcaaaacgcacaaaatgatctggcctcttataacagccaactggtttcgctacagacgcagcccgaacgcgtacaaaatgcgatgtataacgcttcgcagcagctgcaacaaattcgcagtcgtctggatgggactgatgtcggcgagactgccttacgtcccagccagaaagtgttaatgcaggtccagcaggctttgctgaatgccgagattgaccagcagcgtaaaagcctggaagggaacactgtcttgcaggataccttgcaaaagcagcgtgattacgtgacggcgaacagcgcccgtctggagcaccagttacaactgttgcaagaagcggtaaacagcaagcgcctgactttaaccgaaaaaacggcgcaggaagctgtctccccggatgaagccgcgcgtattcaggctaatccgctggtgaagcaggaactggaaattaaccagcagttaagtcagcgtctgattaccgcgactgaaaacggtaatcagttgatgcagcaaaacattaaagtcaaaaactggctggagcgtgcgctgcaatcggaacgtaatattaaggagcagattgccgttctgaagggcagtctgctgttgtcacgtatcctgtaccagcaacaacaaacactcccctcggcagatgaactggaaaacatgaccaaccgcatcgcggatttgcgtctcgaacagtttgaagtcaaccagcagcgtgacgcgctgttccagagcgatgcgttcgtcagcaaactggaagaaggtcacaccaacgaagtcaacagcgaagttcacgatgcattattgcaagtagttgatatgcgtcgcgaattgctggatcagcttaacaaacagttgggtaaccagctgatgatggccattaacctgcaaatcaaccagcagcagttaatgagtgtgtcgaaaaacctgaaatccatcctgacgcagcaaattttttgggtgaacagtaaccgcccgatggactgggactggattaaagcgttcccgcaaacgctgaaagatgaatttaagtcgatgaaaatcacggtgaactgggaaaaagcctggcccgccgtattcatcgccttcctcgctggtttgccgctgctgttgattgccgggctgatccactggcgtctgggctggctgaaagcgtatcaacaaaaactggcttccgctgtgggttccctgcgtaacgacagccagctcaacacaccaaaagcgatccttatcgacctgatccgcgcactgccggtgtgcctgattattctcgctgtcggcctgattctgctgactatgcagctcaatatcagcgagttattgtggtcgttcagcaaaaaactggcgattttctggctggtatttggcctgtgctggaaagtgctggagaaaaatggtgttgccgtgcgtcactttggtatgccggaacagcagaccagccactggcgtcggcaaattgtccgcatcagcctcgcgttgctgccgatccatttctggtctgtggtggcagaactctccccgctgcatctgatggatgatgtgctggggcaggcgatgattttcttcaacctgctgctgattgccttcctggtgtggccgatgtgccgcgaaagctggcgtgataaagagtcgcacaccatgcgactggtcaccattaccgtgctgtcgattatcccgattgcgttgatggtgctgaccgccacgggttacttctacaccacgctgcgcctctccgggcgttggattgaaaccgtttatttggtgatcatctggaacctgctgtaccagacggtattgcgcggcttaagcgtagcggcgcggcgtatcgcctggcgtcgtgcactggcgcgtcggcagaatctggtgaaagagggcgcagaaggtgccgaaccgccggaagaacccaccattgcgctggagcaggttaaccagcagacgctgcgtattaccatgttgctgatgtttgcgctgttcggtgtcatgttctgggcaatttggtctgatttgatcaccgtgttcagctatctcgacagcattacgctctggcattacaacgctactgaagctggtgctgcggtggtgaaaaacgtcaccatgggcagtctgttgtttgcgattatcgcctcaatggtggcctgggcgttgattcgcaacctgcctggtttgctggaagtgctggtgctctcgcgactgaatatgcgccagggcgcgtcgtatgccattactactatccttaactacatcattattgccgttggtgcgatgacggtgttcggatcgctgggcgtctcgtgggataaactccagtggctggcggcagcattatccgtaggtcttggttttggtttacaagagatcttcggtaacttcgtttccggtttgatcattctgttcgaacgtccggtgcgcataggcgacacggtaaccattggtagcttctcgggtacggtcagcaagatccgtattcgtgcgacaacgattaccgatttcgatcgcaaagaagtgattatcccgaacaaagcgtttgttaccgagcgtctgatcaactggtcgttgactgacacgactacgcgtctggtgatccgtctcggcgtggcctatggctccgatctggaaaaagtgcgtaaagtgttactgaaggcggcgactgagcacccaagggtgatgcacgaaccaatgccggaagtcttctttacggcgtttggtgccagcacgttggatcatgagctgcgtctgtatgtgcgtgaactgcgtgaccgtagccgtacagtcgatgagctgaaccgtactatcgatcagctgtgccgtgaaaacgacatcaacattgcctttaaccagcttgaagtgcatctgcacaacgagaggggcgatgaagtgacggaagtgaaacgcgactacaaaggcgacgatccgacgccagcggtagggtaataaccaaagggggcgacatttagttgccccgagattactaacaaagtgcgcgttgttcatgccggatgcggcgtgaccgccttatccggcctacgaaaccgcaagaattcaatatattgcaggagcggtgtaggcctgataagcgtagcgcatcaggcagttttgcgtttgcccacaatcttaggggacatttagcggccccatttatttctcacttttccgcctcatcatcgcgcgttaatttcttttcataatcgcgttttacaatatccagcgcgcgcagcacggtgcgggctgggatctgattttcttccagtagcacaatcaaatcgacggccagtttgacatcgtcaggggcattttccagtgacatactctctccattgctagcgggttaaacgcgctaacctgttttcgattttttccagcgcatggcggcagcgtgccaggcgcgcttcataggcttccacttcacgatgcagcgtctgctgttccacgagagcggtcgctcgcgccagacgggctctacgttcggcaaccatctcacgtagccgccgctcaaaatcctgatgctgaatacgtttacgctgccagcgggcaattttcggtggtgcgctatcccactcgcgtagcgaccaggctgtggcttcacgcgctatagcctccagttgcgccgccagatgttctgccagccaggcgacttgcggcagctgttgctgctcaaccgcatgacgaagcgcagccaggttatcgcccgcctcatcgagacaagcctgtagtgttgtcgcacgggtctgaaaaaggtgcctgtcaaaacgggcacttagcgtggcaaattgcgctaccggggcacaacgctgacgcagcgtggcgagctgtccttccagtttttccagtagcagggtggttttcacgataagacctcaatgaaaatgataattgttatgctaaagtagccactctgtaagctgacaacactcaatatgcaacgaatcattttaatcatcattggctggctggcggtagtgctgggtacgctgggcgtggtattaccggtattaccgacgacgccgtttatcctgctggcggcctggtgctttgcccgttcttccccgcgctttcacgcctggttgctgtaccgctcatggtttggcagttatctacgtttctggcagaaacatcatgcgatgccgcgcggcgcaaaaccacgggcgattttgcttattttgattacgtttacgatttcgctgtggttcgtccagatgccgtgggtgcgcatcatgttgctggtaattctcgcctgtttgcttttttatatgtggcgaattccggtgattgatgaaaagcaagaaaagcactgaagcacaacaatcgcagttgcaattattgcgtacagccagtacattctggcgttttcgagcacaggcgcaggcggtcaaaggttaaacaactgttacttttgatacgttcaaaacgcgccgtgagtaccaccgtaacaagcaggcatacacttatgaccgcgactgcacagcagcttgagtatctcaaaaatagcatcaaaagcattcaggactacccaaaacccggcattcttttccgcgatgtcaccagcttactggaagacccgaaagcttacgctctcagcatcgacttgctggttgagcgttacaaaaatgcgggcattaccaaagtggtcggcaccgaagcgcgtggcttcttgtttggcgctccggtagctctgggtctgggcgttggctttgtaccggtccgtaaaccgggcaaactgccgcgtgaaaccatcagtgaaacttacgacctggaatacggcaccgatcagctggaaatccacgttgatgccatcaaaccgggcgacaaagttctggtggtggacgatctgctggcaaccggcggcactatcgaagcgaccgttaaactgatccgtcgtctgggtggtgaagtagctgacgctgcgttcattatcaacctgttcgatctcggcggcgaacagcgtctcgaaaaacagggcattaccagctacagccttgtcccgttcccgggccattaattatcgtcagtcttgcgctgctcacgctacgggcagcacaagatgtgcattcagcctcgccgttctgacggggctgtgttagcattcccccttcgtgaatccaccttccagcgtttcagagcctgccaatgagttatcaggtcttagcccgaaaatggcgcccacaaacctttgctgacgtcgtcggccaggaacatgtgctgaccgcactggcgaacggcttgtcgttagggcgtattcatcatgcttatcttttttccggcacccgtggcgtcggaaaaacctctatcgcccgactgttggcgaaggggctaaactgcgaaaccggcattaccgcgacgccgtgcggcgtgtgcgataactgtcgtgaaatcgagcaggggcgctttgtcgatctgattgaaatcgacgccgcctcgcgcactaaagtcgaagatacccgcgacctgctggataacgttcagtacgctccggcgcgtggtcgtttcaaagtttatctcatcgacgaagtgcatatgctgtcgcgtcacagctttaacgcactgttaaaaacccttgaagagccgccagagcacgttaagtttttgctggcgacgaccgatccgcagaaattgccggtgacgattttgtcacgctgtctgcaatttcatctcaaggcgctggatgtcgagcaaattcgccatcagcttgagcacatcctcaacgaagaacatatcgctcacgagccgcgggcgctgcaattgttggcacgcgccgctgaaggcagcctgcgagatgccttaagtctgaccgaccaggcgattgccagcggtgacggccaggtttcaacccaggcggtcagtgcgatgctgggtacgcttgacgacgatcaggcgttatcgctggttgaagcgatggtcgaggccaacggcgagcgcgtaatggcgctaattaatgaagctgctgcccgtggtatcgagtgggaagcgttgctggtggaaatgcttggtctgttgcatcgtatcgcgatggtacaactttcgcctgctgctcttggcaacgacatggccgccattgagctgcggatgcgtgaactggcgcgcaccataccgccgacggatattcagctttactatcagacgctgttgattggtcgcaaagaattaccgtatgcgccagaccgccgtatgggtgttgagatgacgctgctgcgcgcgctggcgttccatccgcgtatgcctctgcctgagccagaagtgccacgccagtcctttgcgcccgttgcgccaacggcagtaatgacgccaacacaggtgccgccgcaaccgcaatcagcgccgcagcaggcaccgactgtaccgctcccggaaaccaccagccaggtgctggcggcgcgccagcagttgcagcgcgtgcagggagcaaccaaagcaaaaaagagtgaaccggcagccgctacccgcgcgcggccggtgaataacgctgcgctggaaagactggcttcggtcaccgatcgcgttcaggcgcgcccggtgccatcggcgctggaaaaagcgccagccaaaaaagaagcgtatcgctggaaggcgaccactccagtgatgcagcaaaaagaagtggtcgccacgccgaaggcgctgaaaaaagcgctggaacatgaaaaaacgccggaactggcggcgaagctggcggcagaagccattgagcgcgacccgtgggcggctcaggtgagtcaactttcgctaccaaaactggtcgaacaggtggcgttaaatgcctggaaagaggagagcgacaacgcagtatgtctgcatttgcgctcctctcagcggcatttgaacaaccgcggcgcacagcaaaaactggctgaagcgttgagcacgttaaaaggttcaacggttgaactgactatcgttgaagatgataatcccgcggtgcgtacgccgctggaatggcgtcaggcgatatacgaagaaaaacttgcgcaggcgcgcgagtccattattgcggataataatattcagaccctgcgtcgattcttcgatgcggagctggatgaagaaagtatccgccccatttgatcgtaagcacagcttacgttcgtcatccttaacgtgattgagagagaaacctatgtttggtaaaggcggtctgggtaacctgatgaagcaagcccagcagatgcaagaaaaaatgcagaaaatgcaggaagagatcgcgcagctggaagtcaccggcgaatctggcgcaggtctggtaaaagtgaccatcaacggtgcacacaactgccgtcgcgtagagatcgacccgagcctgctggaagacgacaaagagatgctggaagacctggtggctgcagcattcaacgacgcagcacgtcgtattgaagaaacgcagaaagaaaaaatggcctctgtatcctccggaatgcagctgccgcctggctttaagatgccattctgatgcaaaccagcccgctgttaacacagcttatggaagcactgcgctgtctgccgggcgttggcccgaagtcggcgcagcgtatggcgttcacgctgcttcagcgcgatcgtagcggcgggatgcgtctggcgcaggcgctcacccgggcgatgtcggaaatcggtcactgcgccgattgccgcaccttcaccgaacaggaagtctgtaacatctgttcgaatccacgtcgtcaggaaaacggtcaaatctgcgtggtggagagtccggcggacatttacgccattgagcagacggggcagttttcaggtcgttattttgtgttgatgggacacctgtcaccgctggacggcatcggtcctgatgatatcgggcttgatcgtctggaacagcgtctggcagaggaaaaaatcactgaagtgatcctcgccaccaaccccacggttgaaggtgaagctaccgctaactacattgccgagctttgtgcgcaatatgacgtggaagccagccgaatcgctcatggcgtaccggttggcggcgaactggaaatggtcgatggcaccacgctgtcacactcccttgccgggcgtcataagattcgtttttaagcaaacgagagcaggatcacctgctctcgcttgaaattattctcccttgtccccatctctccctcatcctgtttttaaccttaaaatggcattattgaggtagacctacatgaaaggacaagaaactcgtggttttcagtcagaagtgaaacagcttctgcacctgatgatccattctctctattccaataaagaaatcttcctgcgtgagcttatctctaacgcctccgatgcggcggacaagctgcgtttccgcgcgctttctaacccggacctgtacgaaggtgatggtgaactacgcgttcgtgtctctttcgataaagacaagcgcacgctgaccatctccgataacggcgtggggatgacccgcgacgaagtgattgaccatctggggactatcgctaaatccggcaccaaatcattcctcgaatccctgggttctgaccaggcgaaagacagccagctgatcggtcagtttggtgttggtttctactctgcgtttatcgtggctgacaaagtgaccgtgcgtactcgcgcggcaggcgaaaaaccagaaaacggcgtcttctgggaatcggctggcgaaggtgaatacaccgttgccgacatcactaaagaagatcgtggtactgaaatcaccctgcatctgcgtgaaggcgaagacgagttcctcgatgactggcgtgtgcgttccatcatcagcaaatattccgaccatatcgcgctgccggtagagatcgaaaaacgcgaagagaaagacggcgaaaccgttatctcctgggagaaaatcaacaaagcgcaggcgctgtggactcgtaacaagtcggaaatcaccgatgaagagtacaaagagttctacaaacacatcgcccacgactttaacgatccgctgacctggagccacaaccgcgttgaaggtaagcaggagtacaccagcctgctgtacattccgtctcaggcaccgtgggatatgtggaaccgcgatcataaacacggtctgaaactgtatgttcagcgtgtgttcatcatggacgacgcagaacagttcatgccgaactatctgcgcttcgtgcgtggtctgattgactccagcgatctgccgctgaacgtttcccgtgaaatcctccaggacagcacggtaacgcgtaacctgcgcaatgcgctgaccaagcgtgtgctgcaaatgctggaaaaactggcgaaagacgacgcggaaaaataccagaccttctggcaacagtttggcctggtactgaaagaaggtccggcggaagatttcgctaaccaggaagcgatcgccaaactgctgcgttttgcttctacccataccgattcttctgcgcagaccgtgtctctggaagactacgtttcccgcatgaaagaagggcaggagaaaatctactatatcaccgcagacagttacgcggcagcgaagagcagcccgcacctggaactgctgcgtaagaaaggcatcgaagttctgctgctttccgaccgcatcgatgagtggatgatgaactatctgactgagttcgacggtaaaccgttccagtctgtgtctaaagttgacgagtcgctggaaaaactggctgacgaagttgatgagagcgcgaaagaagcggagaaagcactgactccgttcatcgaccgtatgaaagccctgctcggcgagcgcgtgaaagatgtccgtctgactcaccgtctgaccgatacgccagcgatcgtttcgaccgacgcggacgaaatgagcactcagatggcgaaactgttcgctgcggcgggccagaaagtgccagaagtgaaatacatcttcgaactgaacccggatcacgtactggtgaaacgtgcggcggatactgaagatgaagcgaagttcagcgagtgggtagaactgctgctggatcaggcgctgctggcagaacgcggtacgctggaagatccgaacctgtttattcgtcgtatgaaccagctgctggtttcctgatgtcatgccggatgaccttcgtgtcatccggcatttttcttttcttcatctgcactttccgcaaattatcttgccattaaccgtttcagcctcaggtgcctttcttgaggcaatcgcctgttggtggtatcgtttatcgctttttcaaaaaattcgacacattttaaggggattttcgcaatgcgtatcattctgcttggcgctccgggcgcggggaaagggactcaggctcagttcatcatggagaaatatggtattccgcaaatctccactggcgatatgctgcgtgctgcggtcaaatctggctccgagctgggtaaacaagcaaaagacattatggatgctggcaaactggtcaccgacgaactggtgatcgcgctggttaaagagcgcattgctcaggaagactgccgcaacggtttcctgttggacggcttcccgcgtaccattccgcaggcagacgcgatgaaagaagcgggcatcaatgttgattacgttctggaattcgacgtaccggacgaactgattgttgaccgtatcgtaggccgccgcgttcacgcgccgtctggtcgtgtttatcacgttaaattcaatccgccgaaagtagaaggcaaagacgacgttaccggtgaagaactgactacccgtaaagacgatcaggaagagaccgtacgtaaacgtctggttgaataccatcagatgactgcaccgctgatcggctactactccaaagaagctgaagcgggtaacaccaaatacgcgaaagttgacggcaccaagccggtggctgaagttcgcgcagctctggaaaaaattctcggctaatcaagccgccgcagatctgctctcgggcaggtctgctcatcctcctcaggcaatacctcttacagcaattagttcttcttcttcacttttccgctacaattatcaacaagttgaatcgataagaggcggtaatgcgtcaaactaaaaccggtatcctgctggcaaacctgggtacgcccgatgcccccacacctgaagcggtaaaacgctatctgaaacaatttttaagcgacagacgcgtggttgatacctcacggttgttatggtggccgttgctgcgcggcgtgattttgccgctgcgttcgccgcgtgtggcgaagctgtatgcctctgtctggatggaaggtggctcgccgctgatggtttacagccgccagcaacagcaggcgctggcgcaacgtttaccggagacgcccgtggcgctgggaatgagctacggctcgccatcactggaaagcgccgtagatgaacttctggcagagcatgtagatcatattgtggtgctgccgctttatccgcaatactcctgttcaacggtcggtgcggtatgggatgaattggcacgcattctggcgcgcaaacgtagcattccggggatatcgtttattcgtgattacgccgataaccacgattatattaatgcactggcgaacagcgtacgtgcttcttttgccaaacatggcgaaccggatctgctgttgctctcttatcatggcattccccagcgttatgcagatgaaggcgatgattacccgcaacgttgccgcacaacaactcgcgaactcgcttccgcactggagatggcaccggaaaaagtgatgatgacctttcagtcgcgctttggccgggaaccctggctgatgccttataccgacgaaacgctgaaaatgctcggagaaaaaggcgtgggtcatattcaggtgatgtgcccgggctttgctgcggattgtctggagacgctggaagagattgccgagcaaaaccgtgaggtcttcctcggtgcgggcgggaaaaaatatgaatatattccggcgcttaatgccacgccggaacatatcgaaatgatggctaatcttgttgccgcgtatcgctaaagctgagcggtaaagaactgagcgccgtcgcgaagagcctcgtcggcggttttcatcatccgtgaataatgcaaaaaggcgtgcagcgtgcctgggtagagtttgaactcacagggctgctgatgcgccgctaacgtctggtaaagcagacggctgtcatccagcagtggatcgaactccgccccggcaataaaacagggcggaacttcgcgagtgagatcattattaaacaggcagtaatatggcgactcgcggtccgcgtcgttgcttaaatacgcctcttcatacatctgcaaatcctgttgcgttaagccatcccagacaccacccaacagacgacgagtcacggaatcccgtaatccgtaaagcccataccacagcaaaacgcccgcaactttaccgcaatcgatctgtttatcgcgcaaccacaacgcactggcgagcgccagcatggcacctgcggaatcaccggcaaaaccaatgcgggacatattgatttgataatcctccgcctgctggtggaaataacaacaggcagccacaatttcctctatcgcttgcggaaaacgcgcttcaggtgaaagggtgtaatcaatgccaatcaccgtacattggctgtagcttgccagcaggcgcatgatgcgatcgtgggtatcgagattgccgagaataaaaccgcctccatgcaaataaaatagcgtcgccggcctatctggctgcggataaaagatacgtgttttcacctgcccatattttgttggaaccctgtaagctctggttgccatttctggagcgcccacattccagaatcggcgctcaagcgtgtaatactgtcgttgctcagcaatcgttcccgttgcaggccagggcggtaaatccggctgaagagtattcacaacggtcttcatttcagcagagataaggtccagaacgggtaatttgttttccggcttcatgcaaaaactcctttcaaattacgtcattgtaaggaaccactgccatgaaaatgcgatcccgcctgctgatattgaaactggctgtgtctcgcgcgctcccgtcagattgtgttaacattcgccgctcagttaaccacccgtaaaaacaaccatgaaatttcccggtaaacgtaaatccaaacattacttccccgtaaacgcacgcgatccgctgcttcagcaattccagccagaaaacgaaaccagcgccgcctgggtagtgggtatcgatcaaacgctggtcgatattgaagcgaaagtggatgatgaattcattgagcgttatggattaagcgccgggcattcattggtgattgaggatgacgttgccgaagcgctttatcaggaactaaaacagaaaaacctgattacccatcagtttgcgggtggcaccattggtaacaccatgcacaactactcggtgctcgcggacgaccgttcggtgctgctgggcgtcatgtgcagcaatattgaaattggcagctatgcctatcgttacctgtgtaacacctccagccgtaccgatcttaactatctacaaggcgtggatggcccaattggtcgttgctttacgctgattggcgagtccggggaacgtacctttgctatcagccccggccacatgaaccagctgcgggctgaaagtattccggaagatgtgattgccggagcctcggctctggttctcacctcttatctggtgcgttgcaagccgggtgaacccatgccggaagcaaccatgaaagccattgagtacgcgaagaaatataacgtaccggtggtgctgacgctgggcaccaagtttgtcattgccgagaatccacagtggtggcagcaattcctcaaagaccacgtctctatccttgcgatgaacgaagatgaagccgaagcgttgaccggagaaagcgatccgttgttggcatctgacaaggcgctggactgggtagatctggtgctgtgcaccgccgggccaatcggcttgtatatggcaggctttaccgaagacgaagcgaaacgtaaaacccagcatccgctgctgccgggtgctatagcggaatttaatcagtatgagtttagccgcgccatgcgccacaaggattgccagaatccgctgcgtgtctattcgcacattgcgccgtacatgggcgggccggaaaaaatcatgaacactaatggagcaggggatggcgcactggcagcgttgctgcatgacattaccgccaacagctaccaccgtagcaacgtaccaaactccagcaaacataaattcacctggttaacttattcatcgttagcgcaggtgtgtaaatatgctaaccgtgtgagctatcaggtactgaaccagcattcacctcgtttaacgcgcggcttgccggagcgtgaagacagcctggaagagtcttactgggatcgttaagttatcgtcggttcgtaggccagataaggcgttcacgccgcatctggcattttgctttcaatgcctgatgcgacgctggcgcgtcttatcaggcctacatatccgcgcctattatccggcaaccaccgtttacctcgtcaccacctcacccgccggtggcgtttccagcagttccagcatagtacgggcaatttcacgctcacccatcactacctgattcgcaccacgttcggtgatatacgccacttcatcgtcataatgggcgcgggcaataatctcaatatccggatttttcgcgcgggcagatgccacaatctcgcccgcttcatagccgttgggaatcgtcaggatcagccattttgcacattccagatgcgccagttgcataatttcttcgttcgccgcattgcccaatactgcgcggaccccgcgctcgcgcagctcatcaacacgagttcgtgacgtctcaatcaccaccagcggaatatcagaggcgagcaatttctcccccagcaggctgcctacacgaccgtaacccaccagtagcgcatggttgcaaatatccactgggatctgcttctcttcttcgattgcctcttccagcgtctgctcttccagcgtttcggtcttcgccagatatttttccagtagtgcgaacagtaccgggttgagcataatcgacaggatcgcccctgccagtaccaggttttgtccggcctgcggcagtaaattcaatgccattcctagtcccgccaggataaacgcgaactcaccaatctgcgccaggctggcggcgatggttaacgccgtgcgctgggagtgaccaaacaaacgcacaaggaacagggccgcgaccgatttaccaaacagaataattgccagcgtcgccagtactgccagcggttgctgaatcagaattaacggatcaaacaacatcccgacggagacaaaaaacagcaccgcaaacgcgtcgcgcaatggcagtgtatcgtgggcggcacggtgactcagttcagactcgttcagtaccatcccggcaaagaacgcaccgagtgcaaaggagacatcaaacagctctaccgcaccaaaggcaatccctaacgccagcgctagcaccgacagggtaaacagctcgcgggaaccggttgctgcgctgcgtgccataatccacggcaccagacggcgacctaccaacatcataatggcgataaatgcgatcaccttgccgatggtgatccccatatcgactgcaagagtggcaaagcccacatcgccctgttccatcattcctgctaccgcgggtagcaataccagcgtcaggaccatcaccaggtcttccacaatcaaccaaccgatggcgatttgcccacgctgactgtcaattaattgccgttcttcaagtgcgcgcagtaacaccacggtactggcggtggaaagacataagccgaacacgataccggtcattaacgaccagcccagcacggcggagagcgccatacccagcagcgtcgccacggctatctgggcgatcgcgccgggaatggcgatggactttaccgccatcaaatccttgagcgaaaaatgcaaaccgacgccgaacatcagcaaaataacgcccagttcagccagttccggcgcaagcttggtatcggcaacaaagcccggagtgaatggtcctgccagcacacccgctaacagatatcccaccagaggagaaatacgtagtttattggccagcatgccgaggataaaggcgagcacaaggccgccaacaatggtggtgataagcggggtggcgtgatgcattccgtctccttttcctggtggttattgtccatttttggccgggaaaaccaaaattacaggtaatagtttatgacaatttcattgatgatgtttatgaataattgttgaattttgcagaaaaatggaattagctgcaaaaaaagcacggatcggaaaacagaaggcggtttaacagaggaaaggcttatggcgactgtaaaacgatgcagccaaagtttgcctttggctgcaatgaaatcagtctttatgccggttatcaggcaggaatatggtcaacatccccaatagtggcaggaaagcacagattttatagactaactctatgctggtgtggtcggcgataagccccagaactgccgcccccagacctcccatgccgaaagcaaaaccgaaaaatagtccagaaaccataccgatacgtcccggaagcagctcctgggcatagaccagaatggcagagaatgccgaagcgaggataaatccaataatcaccgttaaaacccccgtccagtgcaggctggcgtagggtaaaatcagcgtaaacggcgcaacgccgaggatagagccccaaatcacatatttccgtccaattttatcccctacaggcccgccaatcaccgtacctgccgcaacggcaaacaggaaggcaaacaaatgaagctgagcattctggatagataatccgaatttttgcatcagataaaaggtgtaatagctgctgatgctcgccatatagaaatatttcgagaaaatgaggattaacagaatgctgaccgccagaacaactttattgcgcggcagtggattgataatcgtcgctttgggttttcctttattcattcggtgctgtgccgagtaccaacggctgatttgcgccaacaccacgatcgccagcagtgccgcaagcacaaaccaggcaacgttgcctttgccataaggcgcgataatcaccgccgccagcaaggggcccagggaactgccaaagttgccgccgacctgaaatatagattgcgccaggccatgacgcccgccggaagccatacgggccacgcgagaagattccggatgaaagaccgatgaaccggtaccgaccagcgccgctgccagcagaactgcgccgaaactgcccgccagcgccagcagcaccagaccacttaaggtaaagcacatgccaatcggcaacgaccacggcatcggatatttatcggtccagtagccgaccaccggttgcagtaacgaagaggcgagctggaaggtgagggttatcatgccaatctgcataaatgtcagagaaaattctgactgaagcagtggataaatcgccagaatcagcgattggatcatgtcgttcagcagatgtgagaggctgatagcacctaaaataccaaacgatgttcgggccttagtcgttgacgcagccgcgcccgccacaggctgggtttgttcactcattgccataggaaagtcactttttcagggttgcgatgtaaagaatgatcttatttgtgattattacccgactaacatacctgtatgcgctgcctgaaggaagtctcaacgcggaatacagaatttctaatctggatgcagatttatcttcaccggacgcagacttgtttatgatgtcgcgtcatactatttttcaacacgttgaaatcaggtcagggagagaagtatgaaattattgcagcggggcgtggcgttagcactgttaaccacatttacactggcgagtgaaactgctctggcgtacgagcaggataaaacctacaaaattacagttctgcataccaatgatcatcatgggcatttttggcgcaatgaatatggtgaatatggtctggcggagcaaaaaacgctggtggatggtatccgcaaagaggttgcggctgaaggcggtagcgtgctgctactttccggtggcgacattaacactggcgtgcccgagtccgacttacaggatgccgaacctgattttcgcggtatgaatctggtgggctatgacgcgatggcgatcggtaatcatgaatttgataacccgctcaccgtattacgccagcaggaaaagtgggctaagttcccgttgctttccgccaatatctaccagaaaagtaccggcgagcgcctgtttaaaccatgggcgctgtttaagcgtcaggatctgaaaattgccgttattggcctgacgacggatgacacagccaaaattggtaatccggaatatttcactgatatcgaatttcgtaagcccgctgatgaagcgaagctggtgattcaggagctgcaacagacagaaaagccagacattattatcgcggcgacccatatggggcattacgacaatggtgagcacggctctaacgcaccgggcgatgtggagatggcacgcgcgctgcctgccggatcgctggcgatgatcgtcggtggtcactcgcaagatccggtctgtatggcggcagaaaacaaaaaacaggtcgattacgtgccgggtacgccatgcaaaccggatcaacaaaacggcatctggattgtgcaggcgcatgagtggggcaaatacgtgggacgggctgattttgagtttcgtaatggcgaaatgaaaatggttaactaccagctgattccggtgaacctgaagaagaaagtgacctgggaagacgggaaaagcgagcgcgtgctgtacacccctgaaatcgctgaaaaccagcaaatgatctcgctgttatcaccgttccagaacaaaggtaaagcgcagctggaagtgaaaataggcgaaaccaatggtcgtctggaaggcgatcgtgacaaagtgcgttttgtacagaccaatatggggcggttgattctggcagcacaaatggatcgcactggtgccgactttgcggtgatgagcggaggcggaattcgtgattctatcgaagcaggtgatatcagctataaaaacgtactgaaagtgcagccattcggcaatgtggtggtgtatgccgacatgaccggtaaagaggtgattgattacttgaccgccgtcgcgcagatgaagccagattcaggtgcctacccgcaatttgccaacgttagctttgtggcgaaagacggtaaactgaacgacctgaaaatcaaaggcgaaccggtcgatccggcgaaaacttaccgcatggcgacattaaacttcaatgccaccggcggggatggctatccgcgccttgataacaaaccgggctatgtgaataccggctttattgatgccgaagtgctgaaagcgtatatccagaaaagctcgccgctggatgtgagtgtttatgaaccgaaaggtgaggtgagctggcagtaatccgaaagtgccggatgttcgcatccggcacaatgcttaatcgcgacgggcgatatcagcaaatttggcatcgagtatctttgccaggtcgcttgccgccagttcgatatccagaccgcgcttgccgccggaaacataaatagtggcaaattcttgtgcgggggcgtcgataatcgttggcagacgttttttctgccccagtgggctaatccctccaaccagatatcccgtcgaacgctgcgcgaccatcggatcggccatctcaactttcttggcacccagcgcttttgctacttttttaagatccagttgacctgcgaccggcgtaacggccacggcaaggtgtttcatatcaccgttcactgcgaccagcagcgttttgtagacctgatccggattcaaacctaattttttgacgacttcatcgccaaaattggtttcagccggatcgtgctcgtaggtatggatttgaaacgaaatcttgtttttttcgagtaatttaactgcgggtgtcatggtaattttcctgccttaaacaaaaaaacgaagcaagcatacgcctgatggcggtccaaaaaaaagagtcatcttgcctaagagtattggcaggatggtgagattgagcgacaatcgagttacaccgtcgcttaaagtgacggcataataataaaaaaatgaaattcctctttgacgggccaatagcgatattggccatttttttagcgcaacatctgcggcaaattcccttctccatacaggtgtagtgcaccgactgcgaccacatagcgccccggcggcatggcgcgtaatttatcccgccaggcgagatttcgctgatgcatcagcacatcgtacagcgactgactgaacgtattgggcagcgttatttcattattttgcggcggcgcattcaaccaccagctcatcatttgttgcagcaaccgtgcattggtgtgccagtgggtcagcgtgtcgtccagcagcgccagtccgttgtcagggagctggagcaacatggcaatctggttttcagccccttccagttcaatcacgggtttatgttgttgcttcgccgcctgcaatagctggtaatcgataccgtattctgcccgcagccccagtttttgtgcctgcgtcgcctgaagaaccatcgcgatttgccacagcggttgagtagaaaagagcgacggagaaatgcccatctcctggctaatatgctgcagattttggagttgctcctcgctaatgcgctcttccagcgtctcgcaggcaggcaaattagcaaaaggcgtatcgctggtggaaacatccgcctcgacgatcagcgcatcggcgtttttgagctttttgagcaaacgggtgggcaggggagccatatcgtggctacccatatgaatactgccgatcagatgaaaatggcgattgccgggaagagagatatcgatagcaggccaggtgtaatgattaccgcgcagcgcggcccaaagcgtttttacccggtacaacagatccatacgacctccctttgtgaaatatcatgctagcgcgcggggagggatggcgcaaatggagttgattgttgcacttgtgcacagtgcttgtgtgcattacaatgattaaataatggacaaggagatgagagaggaatggctcaaaagaaaaatataaggagttttcgtgatgcctggttggctgattttttgtccattcaacgccacatcgaaagatccctgctgaaatccataccacgttatcacgaaagttggacatcattaatgctgccacttctcatcgggatttacgctcccctccggggaaccgatacgaagagttatccgggaaattacaggaatactcctccattagagtgaataaacagtaccgactgatttttaaatgggttaatggcaaggccgaagaattgtttttagacccacacaactactaaaacatagctgtcgtattgacgagaaaggtaaaactatgaaacaggcaacaagaaaaccgacgacacccggagatattcttctctatgaatatctggaaccgctcgatttgaaaatcaatgagttagcagagttgctgcatgttcatcgtaatagcgtcagtgcactgatcaataacaatcgtaaactcaccactgagatggcattccgtctggcgaaagtttttgataccacagtcgatttttggctaaacctccaggcggcagttgatctttgggaagttgaaaacaacatgcgtacccaggaagaattgggacggattgaaacagtggctgaatatttggcacgccgtgaagagcgtgcaaaaaaggtcgcgtagaataatttccctataacggatgcgccaccctaaagcagcgcatccgcaatgatgtacttattccttcggtttaaaccgcagcaatcggttggcgttactcactacggtgatcgacgagagcgccattgccgctccggcaaccaccgggttaagcagtgttccagtgaacggccacaaaataccggcggcgaccggaataccaatgctgttgtagataaacgcaccgagcaggttctgcttcatgttgcgcagcgttgcgcgggaaattgcgagcgcatccgcaacacccatcaggctatggcgcatcagggtaatcgccgcggtttcaatggcaacatcactgccgccacccatcgcaataccgacatccgcctgagccagcgctggcgcatcgttaatgccgtcgcccaccattgccacctgacgtccttcactttgcagacgtttgatcgcttcggctttaccgtctggcagcacgccggctatcacctcatcaatcccggcttctttagcgatcgcattggcggtggtcgggttatccccggttagcatcaccaggcgatatcccgctttatgcaggcgttgcagcgccgccacgctatcactacgcaacggatcgcgtacagccagcagggctactgctttcccgtcaaccgccagcagcacaggcgttgccccttgcgatgcctgagctgaaatatctgcttcaattgctttggtatcgacctgttggtcatttaacagcgcctgattgcccagcaataacgcatgaccttcagcttcaccgctcacgcccagcccgcgcaatgtgcggaaaccgttgacctgcggtagctgcatatcacctgctttatcgaggatcgcccgtgccagagggtggctggaaccttgctccagcgccgccgccagacgcaatgcttgcgcttcatcaatatcagcaaatgtttttactgcgacaacctgcggcttcccttcggtcagcgtcccggttttatcgaacactacggtgtcgagcgtactggcgcgttgcagcgcgtcggcgtcccgtaccagcacgccaaactcagccgcccgcccgacgccggaaataatcgacatcggcgtcgccagccccagcgcacacggacaggcaataatcagcaccgtggtggcaatcaccagagtatagacaatctgcggtgccggaccaaagaaataccagattgccgcactgatcagcgcaatcaccaccactaccggcacaaatacggctgagattttatccgccagctgaccgatttctggcttactgctctgggcctggcgcaccatacgaataatccgcgacagcgtagtatggctgccaaccgcactggcgcgaaacagcacgctaccgtcctgcaccactgtcccggcatggacgctatcgccttcgcctttttgctgcggtataggttcgcccgtcagcatcgcttcatccagccatgcttcgccctgggtaatctcgccatctactggcacgcgatcgccggtcgtcaggcgcagcaacatacctggttgcacttccgccagcggcacgcttttttcaccttcgtcagtaaccaggcgcgccgtcggcggagttaaatcgagtaatttctccagcgcctttgaagaacgctgacgtgcgcgcgcttccagcatatgaccgagattaatcagaccgataatcatcgcactggcttcatagtaaagatgccgtgcttccatcgggaaccacggcggccacaggttgacgctcatcgaatagagccacgcaacacccgttcccagcgccaccagcgtatccatcgtcgccgcaccgttcagcaggcttttccatgcgctgcggtaaaaatgcccgccggcgaaaaccattaccgccagggttatcaggccgataactaaccacaggctgcggttgtcagcggtgaccatcatgttatcgccgatcatcccccagaccatcaccgggatacccaccaccagcgcgacaattgcctgccagcggaagcgcttcatcgtagcgacggcggtttcttgctggcgctcgcggcgtttagcgtcatcttcaatcgcttccgcgccgtagcccgctttttccaccgcctgcactaaatcttgtggggaggcactgcccatcaccagcgcagtacgctccgccaggtttacccgtgcctgagtgacgcccggtacgctttgcaacgcattttgtacgcgggtgacacagctggcgcagctcatgccgctcagcagcaactgctggctgtcatcgtcatcggcggtcgctgccggaagcgcctcagaaaccgctgtcagtgcttccgacgggattgatgactccgccagcggtttagcctttgggtggcttacagatgcgtcataacccgcttgtttgatggtttcgattagctgttctgcactggcagtcccggtaacgtgcgcttcagtgatagacacatccgcctgttcaacatccgggcgctgttcgagactttctttcacgcgtttaacgcagtgaccgcaggacaggccgtccagggtcaggtcgatagtttgtgacataaaacactccttttaagacagttttgactggctgtgataaaggttaaaccttccagcaaggggaaggtcaagaaattaataaaccaggcgggtaaaagtccgtaaagattaaaaaatcggctcgatttgcatcaggattagacatttatctctttgttttcctgtagttaagttgcgggtgctaagttaaatcaggatgcatgaaaatcggcaccggggtgaggaattacctcccgcatctataaaaaggagttaacaaaagatgttagatgcaaacaaattacagcaggcagtggatcaggcttacacccaatttcactcacttaacggcggacaaaatgccgattacattccctttctggcgaatgtccctggtcaactggcggcagtggctatcgtgaccagcgatggcaacgtctatagtgcgggtgacagtgattaccgctttgcgctggaatccatctcgaaagtctgtacgttagcccttgcgttagaagatgtcggcccgcaggcggtacaggacaaagttggcgctgacccgaccggattgccctttaactcagttatcgccttagagttgcatggcggcaaaccgctttcgccactggtaaatgctggcgctattgccaccaccagcctgattaacgctgaaaatactgaacaacgctggcagcgaattttacatatccaacaacaactggctggtgagcaggtagcgctctctgatgaagtcaaccagtcggaacaaacaaccaacttccataaccgggccattgcctggctgctgtactccgccggatatctctattgtgatgcaatggaagcctgtgacgtgtacacccgtcagtgctccacgctcatcaatactattgaactggcaacgcttggcgcgacgctggcggcgggtggtgtgaatccgctgacgcataaacgcgttcttcaggccgacaatgtgccgtacattctggccgaaatgatgatggaagggctgtatggtcgctccggtgactgggcgtatcgcgttggtttaccgggcaaaagcggtgtaggtggcggtattctggcggtcgttcctggcgtgatgggaattgccgcgttttcaccaccgctggacgaagaaggcaacagtgttcgcggtcaaaaaatggtggcatcggtcgctaagcaactcggctataacgtgtttaagggctgatcatgatgaacacggaaggtaataacggtaacaaacccctcggtctatggaacgtcgtttccatcggcattggggcaatggtgggggcggggatcttcgcgctgctggggcaggctgcgttgctaatggaagcctcgacctgggtcgcctttgcttttggcggtattgtggcgatgttttccggttatgcctatgcgcgtctgggggcgagctatcccagcaatggcggtattatcgacttctttcgtcgcggattaggcaacggcgttttttcgctggcgctctcgttattgtacctgttgacgctggcggtgagtatcgccatggtcgcccgtgcttttggcgcttatgccgtgcagtttttgcatgaaggcagccaggaggagcaccttattttgctctacgcattggggatcattgcggtgatgacgcttttcaactccttaagcaaccatgcggtagggcggctggaagtgatcctcgtcggcattaaaatgatgatcctgttattgctgattattgccggtgtctggtcgctgcaaccggcgcatatttccgtttctgcgccccccagctccggggcgttcttctcctgtatcgggataaccttccttgcctatgcgggctttggcatgatggcgaacgcggcggataaagtgaaagatccggaggtcataatgccacgggcgtttctggtggcgattggcgttaccacgttgctttatatctcgctggcgctggttttgcttagcgatgtatcggcattagagttagaaaaatatgccgataccgccgtagcgcaggctgcttctccgctcctcgggcatgtggggtatgtgatcgtcgtcatcggcgctttactggcgacggcttcagccatcaacgcaaacctgttcgccgtgtttaacatcatggacaacatgggcagcgaacgcgaactgccgaagctaatgaataaacctctgtggcggcagagtacctggggcaacatcatcgtcgtggtgttgattatgctgatgacggcggcgctgaatttaggctcactcgccagcgttgccagcgccacctttttgatctgctatctggcggtgtttgtggtggcgatccgcctgcgtcatgatattcacgcctcgttgccgattcttatcgttggtacgttggttatgttgttggtgatcgttggctttatctacagtctctggtcccagggcagccgtgcgctgatatggattattggcgcactcttactcagccttattgtggcaatggtcatgaagcgcaataaaaccgtataacatctctctgtgcgcagtacttcctgtattattgtggtggcggtcgatattcgcactggcaaaaaaacgtgcttgaatatttgttgaaaccctttaacaaagcacaggaggcgttgcgcgaacgatgaacattagcgatgtagcaaaaattaccggcctgaccagcaaagccattcgcttctatgaagagaaggggctggtgacgccgccgatgcgcagcgaaaacggttatcgcacctacacgcagcagcatctcaacgaactgaccttactgcgccaggcacgccaggtgggctttaacctggaagagagcggcgaactggtaaatctgtttaacgatccgcagcgtcacagcgccgacgtcaaacgtcgtacgctggagaaagtagcggagatcgaacagcatatcgaagaactgcaatccatgcgtaaccagctgctggcgctggcgaatgcctgccccggtgatgacagcgccgactgcccgattatcgaaaatctctccggctgctgtcatcatcgggcggggtgattaaggcttgcgaaaatagtcgtccattattttcgtcagctccggacgttccccgtcatcattgatggcaaaatccagaaaaaaagcatctgcttgcggcgttcggttttgcgccatcaaccggaaggtgagggggcgataaatggcgtatgccggatggctgataacgaatcgggcaaagtcaataaaaagcggcgagtgtgtggaaaacagcgcctgcaaaataatatcagccttttcatcctcccccaaaccttgttggatcatgctcttaatacgagtttcgctcaaattcccggcctcaacaatttgccaggcttgatccagcgaggggtaccgactgacgctctgctttaactcttctgaccaggtttcggatgggctgatgtgcttatcagggccgaaactctcccatgcgctgggcggtaatgttttgcacgcggtgagttttggtatgtggtattgcagctctgttttgtgcagacattccccgccaggaaataccagggtttgttgctcatcattaaaatgggttgccgtgctgagcaccagtgttttgagcggtcgcccttccagcgcggcggcagtagccttatggtgtccgtcgagcagaacgcagagataggaatcagggagataccaggccagagcgcgggcgtccggtttatcgcgataaaacgtcgcacgctcaggattaaaatgtgatggcggctggccgggtagaagaaagcagggcgcggtgtcactgaaagagcaatattcaggatcccagacggcaacggttgccggattactggaactatggtccgttgccgcccaaaagaaatgcccgttgccatccgtcgggtaaagttcacgatcttccagcaaataataaccatcagccatgcatgagaacagcggtgtcagcgcggcaaaagcgtccgttatgccagaccacgggcgattccagttttcgagagcagacaaaaaccgggcggctccctgttcatcctccgcaaaaccgctgtagacaaattccgcacaggtagggcatccagcctcggaccagaaacgtattaacgggacatcctgccagcagagcgaatggataagaccgtgcgagtgcggatcgtaaatcacacattgacgcagaaatcctttcccggacttcaccgaaaaaatgacgcccgcagcagtatttttcagcagacgtacttcaggttttcgaaagggggaaaacatggctactccttagccgaacattcaattaacactatgtagggggctatatgccggatgcggcgtaaacgccttatccggcatggggtttggtacagatttccaggtgtgataagacgcatcaggcgatgaccgcacggatgatcagcgttatcccttctatcgcaatgacttcaacatgcgtaccagcgccgagatcctcgctggcgctgacaggccatgaactgtcaccgacgcgcatatgaccgcgcccgttgaccagtggagattccagcacaaaacgtcggccaatcagctgctgcccgcgctggtttaaatgactgtcgctgtgcttttgttcgcgcacccgccgcgacagccatttccaccacaaccaggcggcgagcagtgtcagaatggcaaacatcaccccttgccactcccaacccagcggcaccagccagaccaccaggccggtaatcaccgctgccacgccgctccacaacagataaccattgccgcccaacatctcggctgccagcagcaacccgccgagactgagccagaaaatatgtggatgaacgaccattaactccatcatggctgagtccgtttgttggcgctgtctttcaccagctcggcaatcccggcaatcgaccccatcaggctgctggcctctaatggcatcatcactactttgctgttactggaggaaccgatctgctgtaacgcttcggtgtatttctgtgctacgaagtagttcaccgcctgaatatcgccggaggcaatggcttcagacaccattttggtggcgcgggcttccgcttcggcagaacgttcacgcgcttcggcctgtaagaatgccgactgacgttcaccttccgctttcaggatttgcgactgtttttcaccttcggctttgaggatttccgcttgacggatcccttccgcttcaaggatgtaagcgcgtttggtacgttccgctttcatctgcgcgttcattgaagagataagctctgccggtgggcgcacgtcgcgaatttcaatacgggtgactttaatcccccacgggttggtggcctcatcgacaatacgcagcaggcgtgagttgatgctgtcgcgctgagagagcatttcatcaagttccattgaacccaacacggtacggatgttagtcatggtcaggttgatgatcgccagctccagattgctgacttcataagcggcgcgcggggcatcaatcacctgaataaagcacacggcgtcgatggtaacgttggcgttatctttcgagataacttcctgggaagggatgtcgagcacttgctccatcatattgatcttgcgaccaatgcgatccataaacggcaccaccagactgagccccggctgtaacgttttggtatagcgaccaaaacgttctaccgtccattgatagccctgcggcacgattttgacgcccgcgccgacaatgaccagcgcgacaaaaatgagaatagggataaagataagcatcggaaaaacctcctgttgtaccgtccataatcagcaaaattgctgcttgattaaacaaattatacctgattactgaaagagagttcccccctattcctgcgaaggataaactgtttttagtaaaaatcagaaaaagggaacagtgatgcaggaaaatagtcctttgcttcagctacaaaacgtaggatatctggcgggtgatgcgaagattcttaataacatcaatttttcgctgcgtgctggcgaatttaagttaattaccggtccttctggttgtggcaaaagtacgctgctaaaaatagttgcttcattgatcagcccaaccagcggaacgttactgtttgaaggtgaggatgtcagcacactaaagccagaaatctaccgccagcaagtctcttactgcgcccagacgccgacgctgtttggcgatacggtatacgataatctgatctttccctggcagatccgtaaccagcagcctgacccagccatttttctcgattttctcgaacgcttcgctttgccggacaccattttgacgaaaaatatcgccgagctatctgggggtgaaaaacaacgcatctcattgattcgtaacctgcaatttatgccgaaggttttattgctggatgaaatcaccagtgcgctggatgaaagtaataaacataacgttaatgagatgatccatcgttatgtgcacgagcaaaatattgccgtgctgtgggtgacacacgataaagacgaaattaatcatgcggataaagtgattacactgcaaccgcatgccggagaaatgcaggaagcacgctatgaactcgcataatattactaacgaatcattggcactggcattaatgctggtggtggtggcaatcttaattagccataaagaaaaactggcgctggagaaagatattctctggagcgtcgggcgcgcgataattcagctgattattgtcggctatgtgctgaagtatattttcagcgtggatgatgccagcctgacattattgatggtgttatttatctgctttaatgcggcgtggaacgcgcaaaaacgcagtaaatatattgctaaagcttttatctcatcgtttattgccattacggtcggggcgggaattactctggcggtgctgattttatcgggatcgattgagtttatcccgatgcaggtgatccctatcgccgggatgatagccggtaacgccatggtagcggtggggttgtgttacaacaatttagggcaacgggtcattagcgaacagcaacagattcaggagaaactgagtcttggcgcgacgccgaaacaggcttcagcgatattgattcgcgacagtattcgcgcggctttaattccgacggtcgattcagcaaaaacggtaggcttagtgagtttaccaggaatgatgtccgggctgatatttgccgggattgatccggtgaaggcgattaaatatcagattatggtgacctttatgctgctctcaaccgccagcttgtcgaccattattgcctgctatttaacctatcgtaagttttacaattcgcgccaccaattggtggtgacgcaattgaagaagaaatgatgcgatgccggatgcgcagcatcgcatccggcgttgtggttcatgtgccgatcaacaaaacatcaatacaacaacgcatacagctggcggcgatacttcgacgccagtgcatcacccgtacccagcgcagcgaggatctcctggaatgttttacgtgtctgaccatctgcggcggtgagatctttacgcagatgcccaaacagtaactccagcgcctcttcattgcgcccaacctggtgcagttgcagtgccagttgcgtcgccagtgcggcatcttcaggattctccgccacctgctgttgcaactgttgaatttccggcgtatcagccgcctgcttcagcagttcgatttgcgccaccagcccctgatagcgggtgtcctgatcctgcaacggaatggttttcagcacggcttctgcatcttcagaacggttcagcgcaatcagcgtttctgccaacagcaggccgatctccccgttctgattcgacaactgccaggcgtctttcagcaatggcagggcgtcggtgtgattgccttcctgcatcagttgcatcgcctgctgcgctttcagctcttcttcacgcggcagcactttatccagcagggcgcggatcgcctcttccggttgcggcccctggaaaccgtctactggttgcccgttctggaacagatatacggtcggaatcgcgcgcagaccaaactgggcggcaatcatctgctccgcgtcgcagtccagcttcgccagaataaattgcccgttgtactgcgccgcgaggctttccagaattggggttaactgcaaacagtgctggctacgttcagaccaaaaatagaacagcaccggagtggtcatcgactgttcaagaacctgttgcaggttagattcgttaatgttgacaatattttctacggacatggagtcgctctctgttgtcgatattttctttgacatgggggcttaagcgcgcgcttcaactcacccctgcaatattttgtccatcacgcgccccggcagcaggcgcttaagcaccattactgcccaggtcaccagcgttaccggatagcgcatcttcggcttctcgctaataaaagcatggcgcactttgtcgaccaccgcttccggtcccaacgtaaagcgggcggcgatgccaggattttcgactggtttatcactttgcgtctgattgacgttgtcggtgaagcgagtacgaatgggaccaggttcgatcaggctgactttaattccgctgtggcgcagctccatgcgcagtgcgtctgaccacgcctccagcgcatatttactggccgcgtaagcgccacgacccggtgtggagattaatcccatcaccgatgaggtcatcacaatacgcccttcaccgtgcggcaacatcgcgggtaacaggcgcatggtgagctggtgtgcgccgaaaaagttggcggaaaactgctgttccatctgcgcacggctgatggtggaaagggggccatacatgccgaatccggcattgttaaagatcccatacagacaattatcggtcagggcgatcacttcgtcggctgcgcgatcaacactttctggcgaatccagatcgatcaacacgccggtaaatcccatgctgttcatgcgctcaacatcatccggtttccggcaacctgccagcacatgaaaaccctggcgttttaattcgagcgcgctttccaggccaataccactggaacatccggtaattaagaccgatttttgcataactttacctgtcaggatctccgttgctttatgagtcatgatttactaaaggctgcaactgcttcgccatccagtcggcaataaacggctgggcgtcgcggttgggatgaataccgtcatcctgcatccattgtggcttgaggtagacctcttccataaaaaagggcagcagcggaacatcaaactctttggcgagtttggggtaaatggcgctaaaggcttcattataacggcgaccatagtttgcaggcagacgtatttgcattaacaatggttcagcgttggcggctttgacatcctgcaaaatctggcgcagcgtttgctcggtttgctgtggttgaaaaccacgcaaaccgtcattgccgcccagttcaaccagcacccagcgcggctgatgctgtttcagcagagccggaaggcgcgccagcccttgttgcgaggtgtcgccgctgatgctggcattgactaccgacgttttactctgccacttatcattcaacaaggcaggccaggccgcgctggcagacattcgatacccggcgctcaggctatcacccagaatcaataacgtgtccgctgcagcggcacggaaggttaacaggaccaggaacaggaagggcaaatgccagcggaaaacattgttgaagttcatcatcttaagaagtccgtcggtcagggggagcatgaactctccatcctcaccggagttgagctggttgtcaaacgtggcgagaccatcgcactggtgggtgagtcgggatcgggtaagtcaaccttgctggcgatcctcgccgggctggatgacggcagcagtggcgaagtgagtctggtgggacaaccgctacataatatggacgaagaagcgcgggcaaagttgcgcgcgaagcacgtaggctttgtttttcagtcatttatgttaattcctacccttaacgcgctggaaaacgtcgagcttccggcgctgctgcgcggtgagagtagcgcagaaagtcgtaacggggcgaaagcgttgctcgaacagttagggttgggtaaacgtcttgatcatcttccggcacagctttctggcggcgaacagcaacgagtggcgctggcgcgagcctttaatggtcgatctgatgtgctgtttgccgacgaacccaccggcaaccttgaccgccagacgggcgataaaattgccgatctgcttttttccctcaaccgtgagcatggcaccacgttgattatggtgacccatgacctgcaactggcggcacgctgtgaccgctgcttacggctggtgaacgggcagttgcaggaggaagcatgattgcacgttggttctggcgcgaatggcgctcgccgtcgctattaattgtctggctggcgttaagcctggcggtggcctgtgtgctggcgctgggcaatattagcgatcgcatggagaaaggtttaagccagcaaagccgtgagtttatggcgggcgatagggcgttgcgcagttcgcgcgaagtgccgcaagcgtggctggaggaagcgcaaaagcgcggcctgaaagtcggcaagcagctgactttcgccacaatgacctttgcaggcgacacaccgcagctggcgaacgtcaaagcggtggatgatatctacccgatgtatggcgatctgcaaactaatccccctggcctgaaaccgcaggcgggcagcgtattgctggccccacgcctgatggcactgcttaacctgaaaacgggcgataccattgacgtgggcgatgccaccttgcggattgccggagaagtgattcaggaaccggattccggttttaatcctttccagatagccccacgcctgatgatgaatctggcggatgttgataaaaccggagccgtgcagccggggagtcgggtcacctggcgctataaattcggcggcagcgagaaccagctcgacggctatgagaaatggttgttaccccagcttaaacccgaacaacgctggtacggtctggaacaggacgaaggcgcgctggggcgatcgatagaacgttcgcaacagttcctgctgctttcggcgcttctgaccttgctgctggcggtggcggcggtcgcggtggcgatgaatcattactgtcgcagtcgctacgacttggtggcgatcctcaaaacgctgggggcagggcgagcgcaactgcgtaagttaatcgtcggtcagtggttgatggtgctggcgctttcagccgttaccggtggggcgataggcctgttgttcgaaaacgtgttgatggtgctgctcaagcccgtgctacctgccgctttacctcctgccagcctctggccgtggctgtgggcgctcggcaccatgacggtcatctcgctgctggtggggctgcgaccataccgcctgttgttggcaacgcagcctttacgcgtgttacgtaatgatgtggttgcaaacgtctggccgctgaagttttatctgccgattgtcagtgtggtggttgtgctgctgctcgccggactgatgggcggcagtatgctgctctgggcggtgctggcgggcgcggtagtactggctttgctgtgcggtgtgctgggctggatgctgctgaatgtacttcgccgcatgacgctgaaatcgctacctctgcgcctggcggttagccgcctgttgcgtcagccgtgggcgacgttaagccagctttcggcattttcgctctcctttatgctgctggcactgttgctggtgttgcgtggcgatctgctcgaccgctggcaacagcagctaccgccagaaagcccgaactactttttaatcaacatcgctacggaacaggttacgccgctgaaagcgtttctcgcggaacatcagatagtcccggaatcgttttatccggtggtgcgggcgcggttgacggcgattaacgacaagccgacagaaggcaatggagatgaggcgctcaaccgcgagctgaatctcacctggcaaaatacgcggcctgatcataacccgatcgtcgccggtaactggccgccaaaagccgatgaagtgtcgatggaagaggggctggcgaaacgcttaaacgttgccctcggcgataccgtgacttttatgggcgatacccaggagttccgcgctaaagtgaccagcctgcgcaaagtggactgggaaagtctgcggcctaatttctattttattttcccggaaggggcattagacgggcaaccgcagagctggcttaccagtttccgctgggagaatggcaacggcatgttgacgcaactcaaccgccagttcccgaccattagcctgttagacattggcgcgattttaaaacaggtcggtcaggtgctggagcaggtaagtcgggcgctggaagtgatggtggtgctggtcaccgcctgcggcatgttgctgttgctggcgcaggtgcaggtgggaatgcgtcagcgtcatcaggagctggtggtgtggcgcacacttggtgcggggaaaaaactgctgcgcacgacattgtggtgtgagttcgccatgctcgggtttgtatccggcctggtggccgcaatcggtgcggaaacggcactggcggtactgcaatcgaaagtgtttgatttcccgtgggagccagactggcgattgtggattgtgctgccgtgcagcggtgcgctactgctgtcgctttgcggcggctggctgggtgcgcgactgcttaagggtaaggcgctgttcaggcagtttgcggggtgatgacaggtgttagattgcctgatgcgctacgcttatcaggcctacgaagatcgtgcaatatattgagttttcgaaattttgtaggctggataaggcgttcacgccgcatccggcatgaacagcgtgcacagaatcccccatcactgcgccttaacccattccgccacttccgcccactcaccgcgaaagacaactttttccgcttttttctcaagctgatagcgatacatcgggtcgtaatattcttcaagtaacggcaccagccaggccagatgaccgtcggtgctgccggtggtgagttgcgttgtcagcgccgcatccagccttgcagccagttcgttatagcgttgtagtcccagccgacgtttaatcgccgaaagcccgtgatgcaggtattcgcaatactcctgccagccctgttcgtcgccataagcgtgggtaaaatcatgatgcatacgcaagaaatactcttcgttcaggcgttcaagacggatctcaaacggatcttctaccaccgcaatcgtcgcctgagtcattcgttcgcgcagacattccggcaggtgattcgaaccgatcatccggctttcatcttccagcacccacaggcgcaaatcctgatgggcgtcggtttttagcatttcggcagccagcatgttttcaaaactcgcctggctaagttgtggttgtaacgtgcgaccaaaagcagaaccgcgatggcgcgccagcccttccagatcaacaccgttcggctgttgttgtactaacagcgttttgccgctgccggtacaaccgccaatcagcactatcggtttttgtgccagttcaatggttgcctgaatcgcggtctggcgcagtgccttataaccgccttccaccagcggataatcaatccccgcgtcatgcagccagcgttgcacaatatgcgagcgttgaccgccacgggcgcagcagagaataccgtgcggattttgcaggcacgctgcccgccaggcgtccatgcgctgctgacgaatttcacccgccaccagtttatgccccagtgccagcgccgcgtctgacccttgctgtttatagcagatgccaacggcggcgcgttcatcgttattcattaacggcaggttgatagcggcgggcattgcgccttgctcaaactcgatgggggcgcgaacatcaataatgggcgtatcagcaatcagcagggcacgatagtcctgttccgtgtgtctctcttgcatagtaaaaagtgaacctcaaatcagcttgcgcgctattttacgcgccaacgcgcaaggaaacttgatttttaactgcgtgggttgccgaaaatttctaaaaatccgctgatttccggcctgcgctgggtaaacaaggtcacaatatcttctaccgctttgccgctgccaaatttgcgccatgccagactcaatggcgaaggagggcgcatcgttgggattacccggctgaccagttgttgattatcgagcattgactggcaaagtgattttggcaaaaaaccaatgcccacgcccgccagatgggcggcgattttcgtttccatatcgggaacaataatctctttttgccccggcaatcgccaggcgacgcgtttggttaaggtgcgggcgctgtcttcaatattgaccgccggaaagcgccgcaactgtgcttctgttagcggctcttcaacgttcgccagcggatgatccgccgccatgacaaagcgccattgcaccgatcctaagggatcaagactaaaggtatttgccagcgcctcggttcccgtgacgccgatagccagtgaaaaaccttcgtacaatagcgagtcccagacgcccatatagatttgtcgggagatgtgaaattgggtaaacgggtaacgttcatttagccacgccagcagcctggcaacggcctgagggttatagagcaggttgttgatgacgatattcacctggcgttccacgccatcattcacctgttgtaactcgctgggcatactttccagccagctcagccagtctctggcctgacaaagtagatgctcgccagccgccgtcaacgtcacgctgcgagtcgtgcggaaaaacagcgccactccggtattctcttccagaagtttaatgcgataactgatcgtcgccgtggttttacataatcgttctgccgcttttgaaaaacttcctgtttcagcaaccgcaatgaaagtccgcaaggtttctggatcgaacatcttcaggtatccccttttaaatccgcaagttgcgtgattttcttatcctctgatttatcagtatttttacatgataaccctgttcaatttgtggactaaatctagttttggaaaaatattccaacttttgtgttgatgttgttctcttaaggttttagattgcctgttattgaaaccaagctgaccggtcggcggtggttgaacggaattatgttacaaggacaaaaagatgaaacttcaggtattaccgttaagtcaggaagccttctgtgcttatggcgacgtaatcgaaacgcagaaacgggattttttccatattaacaatggcctggtggagcgctatcacgatttagcgctggttgagattcttgagcaagaccgtacgcttatcagcattaaccgcgcgcaaccggcgaatctgccgctgaccattcacgaactcgaacgtcatccgttgggcactcaggcctttatcccgatgaaaggtgaagtgtttgtggtagtcgtggcgttaggtgacgacaaaccagacctgtcaaccctgcgggcgtttattaccaacggcgaacagggagtgaattaccatcgtaacgtctggcatcacccacttttcgcctggcagcgcgtcaccgattttctgaccatcgatcgcggcggcagtgacaactgtgatgttgaaagtattcctgaacaggaactctgttttgcgtgacgcctgcaaccgacttgcataagataaacgaattgttcattgtttatgctcatttgtaggtcggagttaacgtaggtatgacggaagttagacggcgcggcaggccaggacaggcggagcctgtggcacagaagggtgcacaggcgttagagcggggaattgcgattctgcaatatctggaaaaaagtgggggaagttcgtcggttagcgatatctctctcaatctggatttgccgctctccacgacctttcgcttgctgaaggttttacaggcagcggattttgtctatcaggacagtcagttaggctggtggcatataggattaggtgtctttaacgtcggtgcagcgtacatccataaccgcgatgtactctccgtcgccgggccgtttatgcgccgcctgatgttactttccggcgaaacggtcaatgtcgcgatccgtaacggcaatgaagcggtattaattggtcagttagagtgtaaatcgatggtcaggatgtgtgcgccgctgggcagtcgtctgccgctgcatgcttccggagcgggcaaggcgctgctttatccgctggcggaagaagagttgatgagcatcattctgcaaaccggtttgcagcagtttacgccaacgacgcttgtggatatgcccaccttgctgaaggacctggaacaagcgcgtgaactgggctataccgtagataaagaagagcatgttgtcggcctgaattgcatagcttcagcaatttacgatgatgtaggtagtgttgttgccgctatctccatctccgggccttcatcaagactgacagaagatcgttttgtcagccagggtgagctggtcagagacaccgcccgcgatatcagcacggcgttgggactgaaagcacatccatagtgtctgtcgtatcccgctctgcggagcgggtttttttgacaaaatttgagagttggaaaatttttccaattaatagaggtaggaataaaatggcaaaaatgagagccgttgacgcggcaatgtatgtgctggagaaagaaggtatcaccaccgccttcggtgttccgggagctgcaatcaatccgttctactcagcgatgcgtaagcacggcggtattcgtcacattctggcgcgtcatgtggaaggtgcttcgcacatggcggaaggttatacccgcgcaacggcagggaatatcggcgtatgtctggggacttccggtcctgcgggcacggacatgatcaccgcgctctattccgcttctgctgattccattcctattctgtgtattaccggccaggctccgcgcgcccgtctgcataaagaagatttccaggccgttgatattgaagcaattgctaaaccggtcagcaaaatggcggttacagttcgtgaagcggcgctggtgcctcgtgtgctgcaacaggcgtttcacctgatgcgttctggtcgcccgggtccggtactggtggatttaccgttcgacgtacaggttgcggaaatcgagtttgatcctgatatgtatgaaccgctgccggtctacaaacctgctgccagccgtatgcagatcgaaaaagctgtagaaatgttaatccaggccgaacgtccggtgattgttgccggaggcggggtaatcaatgctgacgcagctgcactgttacaacagtttgctgaactgaccagcattccggtgatcccaacgctgatgggctggggctgtatcccggacgatcatgaactgatggccgggatggtgggcctgcaaaccgcgcatcgttacggtaatgcaacgttgctggcgtccgacatggtgtttggtatcggtaaccgttttgctaaccgtcataccggttcggtagagaaatacactgaagggcgcaaaatcgttcatatcgatattgagccgacgcaaattggccgcgtactgtgtccggatcttggcattgtctctgatgctaaagcggcgctgacgctgctggttgaagtggcgcaggagatgcaaaaagccggtcgtctgccgtgtcgtaaagagtgggtcgccgactgccagcagcgcaaacgcactttgctgcgcaaaacccacttcgacaacgtgccggtgaaaccgcagcgcgtgtatgaagagatgaacaaagcctttggccgcgatgtttgttatgtcaccaccattggcctgtcacaaatcgctgcggcacaaatgctgcatgtctttaaagaccgccactggatcaactgtgggcaggcaggcccgctgggctggacgattccggcggcgctgggggtttgtgccgctgatccagagcgcaatgtggtggcgatttccggtgacttcgacttccagttcctgattgaagaattagccgttggcgcacagttcaacattccgtacatccatgtactggtcaataacgcctatctgggtctgattcgccagtcgcaacgtgcctttgatatggattactgcgtacagctcgcgttcgaaaatattaactccagcgaagtgaacggttatggcgtcgaccacgtaaaagtagcggaaggtttaggttgtaaagctattcgcgttttcaaaccggaagatattgcaccagcctttgaacaggcaaaagtcttaatggcgcaatatcgggtaccggtagtcgtggaagttattctcgagcgtgtgactaatatttcgatgggcagtgaactggataacgtcatggaatttgaagatatcgccgataacgcagcggatgcaccgactgaaacctgtttcatgcactatgaataagggagataaataatgttacgtttctctgctaatttatcgatgttatttggtgaatatgattttctcgcccgttttgagaaagctgcgcagtgtggttttcgcggcgttgaatttatgttcccttatgactacgacattgaagaattaaaacaggtgctggcgagtaataaactcgagcatacgctgcacaatttaccagcgggtgactgggcggcgggcgagcggggtattgcctgtattcctggccgtgaagaagagtttcgggatggcgtagcagcagcgattcgttatgctcgtgctctgggtaataaaaaaattaactgtctggtcggtaaaacgccgactggtttcagcagtgaacagattcacacaacgcttgtagaaaacctgcgttatgccgcgaatatgctgatgaaagaagatattttattactgattgaacctattaaccattttgatattcctggtttccatctcaccggaacccggcaggcactgaaactgattgacgatgttggttgctgcaatttgaaaattcagtatgacatttatcacatgcagcggatggaaggtgaattaactaataccatgactcagtgggccgataaaattggtcacctgcaaattgctgataatccgcatcgcggcgaaccgggaaccggagaaattaattacgaatatctctttacggtaattgaaaattctgactacaacggttgggttggctgtgaatataaaccccaaaccaccacggaagccggtttacgctggatggatccgtaccgttaaaacgtaacgctattcagacaatgcttttttaggccgctaagttggcaggggatcgtgttgtctgaattcaggaaaagcgaaatttaaaagaggttaattatgaaactgggatttattggcttaggcattatgggtacaccgatggccattaatctggcgcgtgccggtcatcaactgcatgtcacaaccattggtccggttgctgatgaattactgtcactgggcgccgttagtgttgaaactgcgcgccaggtaacagatgcatcggacatcatttttattatggtgccggatacgccacaggttgaagacgttctgtttggtgaaaatggttgtaccaaagtctcgctgaagggcaaaaccattgttgatatgagctccatttccccgattgaaactaaacgtttcgctcgtcaggtgaatgaactgggcggcgattatctcgatgcgccagtctccggcggtgaaatcggcgcgcgtgaagggacgttatcgattatggttggcggtgatgaagcagtatttgaacgtgtaaaaccgctgtttgaactgctcggtaaaaatatcactctcgtgggcggtaacggcgacggtcaaacctgcaaagtggcaaatcagattatcgtggcgctcaatattgaagcggtttctgaagccttgttgtttgcttcaaaagccggtgcggacccggtacgtgtgcgccaggcgctgatgggcggctttgcttcctcacgtattctggaagttcacggtgagcgcatgattaaacgcacctttaatccaggtttcaaaattgcgctgcaccagaaagatctcaacctggcactgcaaagtgcgaaagcactggcgctgaacctgccaaacaccgcgacctgccaggaattgtttaatacctgtgcggcaaacggtggcagccagttggatcactctgcattagtgcaggcgctggaattaatggctaaccataaactggcctgatacccgcaataaaaatggccgatatcagaaaatgaatcggccagcaatattaaaaaaagaaagcagccaaagatgttgcttcagtattaaaaataatatttttattttatttgttcctcatagctagattaaaacaacgttattcgatacgtgaaattaagagggatttatggaacatcagagaaaactattccagcaacgcggctatagcgaagatctactgccgaaaacgcaaagtcagcggacctggaaaacatttaactattttaccttatggatgggttcggttcataacgttcccaattatgtgatggttggcggcttttttattctcggcttgtctacctttagtattatgctggcaattatcctcagtgcctttttcattgccgcggtaatggtattaaacggtgctgcgggcagtaaatacggcgtaccgtttgccatgatcctgcgtgcttcttacggcgtacgtggtgcactgtttcccggattattaagaggcggtattgctgccattatgtggtttggcctgcaatgttacgcggggtcactggcctgcttgattctgattggcaaaatctggccgggatttttgactctcggtggcgatttcacgctgttaggcctttctctaccgggattaattacttttttactcttctggctggttaacgttggtattggttttggcggcggaaaagttttaaataaattcactgccattcttaacccgtgcatctatatcgttttcggcggtatggcgatttgggcgatttcgctggtcgggatcggtccaatctttgactacattccgggcggtattcagaaagcagaaaacagtggcttcctgtttctggtggtgataaacgcggtggttgcggtctgggcggcaccggcggtgagcgcatccgactttacgcaaaacgcccactcgtttcgtgagcaggcgctggggcaaacgctgggtttagttgtggcctatattctgtttgcggtcgccggggtatgtattattgccggagccagtattcattacggcgctgacacctggaacgtgctggatattgttcagcgttgggacagcctgttcgcctcgttctttgcggtactggttattctgatgacgactatctctactaacgccaccggtaatattattccggctggttatcagattgccgccattgcaccgacgaaactgacctataaaaacggcgtactgattgccagtattatcagcctgctgatctgcccgtggaaattaatggaaaatcaggacagtatttatctgttcctcgatattatcggcggaatgcttggtccggtaattggtgtgatgatggcgcattattttgtggtgatgcgtgggcaaattaatcttgatgaactgtacaccgcacctggcgattataaatattacgataacggttttaacctcaccgcgttttcagtaactctggtggccgttattttatctcttggcggtaagtttattccctttatggaaccgttatcacgtgtttcatggtttgtcggcgtcatcgtcgcctttgcggcctacgccttattaaagaaacgtacaacagcagaaaaaacaggagaacaaaaaaccataggttaattaatcacgatattgaacattgagttaaaaaccaatctgtattttacaaggagtttgttatgtcttttgatttaatcattaaaaacggcaccgttattttagaaaacgaagctcgcgttgtagatatcgccgttaaagacggaaaaattgctgctatcggccaggatctgggcgatgcaaaagacgttatggatgcgtctggtctggtggtttcgccgggcatggttgatgcgcacacccatatttctgaaccgggtcgcagccactgggaaggttatgaaaccggtactcgcgcagcagcaaaaggtggtatcaccaccatgatcgaaatgccgctcaaccagctgcctgcaacggttgaccgcgcctcaattgaactgaagttcgatgccgctaaaggaaagctgactatcgatgcggcacaactcggtggcctggtgtcttacaacattgaccgtctgcatgagttggatgaagtgggtgttgtcggtttcaaatgcttcgttgcgacctgtggcgatcgcggtatcgacaacgacttccgtgacgtcaatgactggcaattcttcaaaggcgcgcagaagctgggtgaactaggccagccggtgctggtgcactgcgaaaacgcgctgatctgtgacgcactgggcgaagaagcgaagcgtgaaggtcgcgtaactgcccatgactatgtggcttcgcgtccggtatttaccgaagtggaagcgattcgccgcgtactgtacctggcgaaagtcgctggttgccgtctgcacgtttgccacgtcagcagcccggaaggtgttgaggaagtgactcgtgcacgtcaggaaggtcaggatgttacttgtgaatcctgcccgcattactttgtgttggataccgatcagttcgaagaaatcggtactctggcgaagtgttcaccgccgatccgcgatctggaaaaccagaaaggcatgtgggaaaaactgtttaacggtgaaatagactgcctggtttccgaccactctccatgcccgccggaaatgaaagccggtaacatcatgaaagcgtggggcggtatcgctggtctgcaaagctgcatggacgtgatgttcgatgaagcggtacagaaacgcggaatgtctctgccaatgttcggcaaattaatggcgactaacgcagcagatattttcggtctgcagcaaaaaggccgtatcgctccaggaaaagatgccgacttcgtcttcattcagccgaatagcagctatgttcttaccaatgacgatctggaatatcgccacaaagtcagcccgtatgttggccgtactattggcgcgcgtatcacgaaaaccatcttacgtggtgatgtgatttacgatatcgaacagggcttccctgttgcgccgaaaggtcaatttatccttaaacatcagcagtaatctggccctgcaatgcccgtccttgtggcgggcattctccggttaaggtgtgtttatgttcaattttgctgtgggccgcgaaagcctgttatcaggatttcagtggtttttctttattttttgcaacacggttgtggttcctcctacgctactttctgcttttcagttgccgcaaagtagcctgcttacgctcacgcaatatgcttttcttgctaccgcactggcctgcttcgctcaggcgttctgcggtcatcgtcgcgctattatggaggggccgggcggcctgtggtggggaaccatcctgactatcacccttggcgaagcatcgcgcgggacaccgatcaacgatatcgctaccagtctggcggtggggattgcgctctccggcgtgctgacgatgttgattggttttagcggattaggccatcgcctggcacggttatttacgccgtctgtgatggtcttgtttatgttgatgctgggtgcgcaactgaccactatctttttcaaaggtatgctcgggctgccgtttggcatagccgacccgaattttaaaattcaattaccgccgttcgcgctctcggtggcggtgatgtgcctggtactggcgatgattattttcctgccacaacgttttgcccgttacggcctgctggtcggtacaataaccggctggttgttgtggtacttttgctttccttcttcgcattcgctctccggtgagttgcactggcagtggttcccgctcggcagtggcggtgctttgtcgccggggattattctgacggcggtgattacaggtctggtaaatatcagcaatacctacggtgcgattcggggcacggatgttttttatccgcagcagggcgcggggaatacgcgttatcgtcgcagctttgtggcgaccggatttatgacactgataaccgtgccgctggcagtaattccattttcaccgtttgtttcatccattggtttattaacccagactggcgattacacgcggcgttcgtttatttatggcagcgttatttgcctgctggtggcactggttccggcactcacgcgactgttttgcagtatccctttacccgtgagtagcgcggtcatgctggtttcttatctgcctttactcttttccgcgctggtgtttagccagcaaataacgtttaccgctcgcaatatttatcgactcgcattgccgttatttgtcggcatatttttaatggcattaccgcctgtgtatctgcaagaccttccattaacgcttcgtcctctgctcagtaacggcttactggtcggaattttactggctgttcttatggataatcttattccgtgggaacgcatcgaataatttgttgaaaaaggattgataatgaagattgtcattgcgccagactcttttaaagagagtttaagtgcagaaaaatgttgtcaggcaattaaagccgggttttcgaccatatttcccgatgcgcactatatctgtttgccgatagcggatggcggcgaagggacggtggatgcgatggtcgccgcgacgggcggcaacatcgtgacgcttgaagtctgcgggccgatgggcgaaacagtgaatgctttttatggccttaccggcgacgggaaaacggcggtgattgagatggcggcggcaagcggcctgatgctggtcgcgcctgaaaagcgtaatccgttgctggcgtcaagttttggcaccggagagctgattcgtcatgcgctggataacggcattcgccatattattctcggcattggcggcagtgcgacggtcgacggcggtatgggcatggcgcaggcgctcggtgtgcgtttccttgatgctgacggtcaggtgctggcggctaacggcggcaatttagcgcgcgtggcaagcattgagatggatgaatgcgatccgcgtctggcgaactgccatattgaagtagcatgtgatgttgataacccgctggtaggggcacgcggcgcggcggcggtgtttggtccgcaaaaaggggcaacgccggaaatggtcgaagaactggaacaggggctgcaaaattacgcccgtgttttacaacagcaaactgaaattaatgtctgccagatggcgggcggcggcgctgcgggcggtatgggcattgcggcgacggtattcctcaatgcggatattaaaccgggtattgagattgtgttgaatgcggtcaatctggcgcaggcggtgcagggtgcagcactggtgatcaccggggaagggcgcatcgactcgcaaacggcaggcggtaaagcgccgctgggcgtggcgtcggtggcgaagcagtttaatgtcccggtgattgggattgctggcgtattgggtgatggcgtggaagtggtgcaccagtacggcattgatgcggtattcagcattttgccacgtctggcacctttagccgaagtgctcgccagcggtgaaaccaatctcttcaacagtgcgcgaaatattgcctgcgccattaaaataggtcagggaattaaaaactgactattacctttaaagcggatgcgatttatatcgcatctttttttacctgaattgactacaaaaaaagccacggaataaaccgtggcaaaatccaacatagctaaaaataatcaggcgagtggtatgacttaaatctctacgtcgcggttgcaatctttcgagtaaatatagctgaacgcttcaccacgccccacgccataaccggcctgtaaggaataagcgcccataaagatgtaatcgccttttttcaccgggatccagttattgtcgaggttataaaccccctgaccggaaagaatataggcaccgtgttcctgaacgtgtgtttcgatataaccatggctggcacctggcgcaaaagagaggatatgcatgttcatatcaaaacctaactctttgggcagaaaatccagcagaataacatcgtccatgccttcataatgaatgcgttccagttcgctggcattgccagaaaccagccacggcgcatgaccttctaccggaatatagcgacgcttatataaaaagatttggctgtcttcggcctgggcgttaacaaacgtcattaaggagcctggcgggcaataaagatagccaccttcgcttaaggcaaatgttttcccttcggctttggcagtgatatttccagagatcacatacaggaacgtttcaatgccttcgccaccgaagccctgttggttgccgccgttttgatgcagtgtgaccagataatcaacaaaagaggcacccagctttggcgtggagaggattgtcgcgtcacaattttcaaagcccggaataatattttttaccagaccgtctggtgttaacagtgcgaaattaccgtgtttaacaatcgcacggttagccagtaaatcttcgcggtaaccggtgacgttatttaaatatcccatttataactccttatttctgccaggcaagttgataaagcatgagtgccaacgttttgaccccttcggcaaggtcggtaatattggtgcgttccgccgggttatggctgatcccgttgatgctgggaatgaaaatcatgcaggtcggcacgcgaggcgcgaaaatttgcgcgtcgtgcccggcaccactgtgcatcacccggtaattcagtttttcgctttcacacaattctgtcagggtggcgaccagctccttattcatcggcacgggttcttcgtccatccataaatcgatatcaataccaatatccatttcatcgcaaatcgcccgcatgtcgttttctaactgttgggtgaaatcgcgcagcacggtagcgtcggtatgacgacaatcaatggtgaacgtggttttacccggcactacattcaccgtattcgggcgcggctctactttgccaaaggtcagaaccagcgggtcgcccatctttttcgctttttcgacagactgatggcaaatgcgactgaaagcgtaaaccgtatcacgacgataacccatcggcgtggtgcctgcatggtttgattcgccattcagcgtcaccgtataacgacgctgcccgacaattgcattcaccacgccaattgattgcccattactttccagcacacagccctgttcgatatgcagttcgacaaaggctttaatatcctgacgcggagttagtggggcgttcggcagagtaaatccgcaagccttcatcgcatcgacaaaactatttcctttggcatcacagatattccgcacgtcgtcaggattcgccagcccaaaaatatttttactgccccagaaaacatacgggaagcggctgccttcttcttctgccatcgccaccacttcgaccgtacgtaacggcgcgccgtattgcgttttcagccagtcaatagccagccacgccgccagcgcaccgaattgcccgtcgaggttaccgccgttaaccacggtatcgatatgcgaaccgctcagaaccacttcctgtggatattcggtgccactcaggcgaccgtataaattccccacttcatcgaaacgtgtttccagcccgcttgctaccattctttttttaaactgctgctgggtttccagccattccggcgaataaagtaaacgggtcatcccacccgctgggtcagcgccaaaagaggaaagccagggcagcgtttcttctatagcttgacggaaatgtgtaatcataagaaagtcctgtctcaataattattgcgcaaagggatttttcgtttcgtatgacgtgttataaagcgcgtcggaaattaaatactggtaaatatcatcaacaatttcgatgccttcgacggcggctttgcgttgtttaatatcctgatcctgtccgggataataaacctgattaaaaccgggcgcgggggtaatggtatttaattcgcgcatggtctggctaagatgttgacggaataattcgctggaggagaaaaagttcgggttaataactatatgtaattgccccaaattacgcccggcgtgtaaatcgtcatacatcgaactaacctgtcgcccgaacggtaagccgagtaagacgcctgagaggacgtcaatcatcatcatcaggccataccctttcggcccagcggcggggagcagagcatgtaccgcgaacggatcggttgttggtgcaccgtttttatcgactgcccaggtatccgggatagacatattgcgcgagcgggcgtcgagcacttttccccatgcctgtacggtagtcgccatatcaaaggtaaggatctcgtcgccttctcccggcgcggcaaaggccagtgggttagtgccgtagtaaatttccgcgccgccaaacggcaccaccattggatcggactggcacagcgaaatgccaattaatccggcgcgggctgcctgctgcacaaaataagagattgcgccgctgtgacccatccggctgataccgaccaccgcaacgcctttttgctgggcggttttgatggcatgttccatacccattttcgctgcgacctgtccggcggcattgtcggcatgtaaaattgccgagcacggtccggtttcctcaagacgaaactccggttcgcggttggtgccgccttttgaaatacgttcggcgtagtattcaacgcgcaccgcgccatgagagtggatccctctggcatcggcgtaaaccaatacttcagccacggttgcagcgtgctcacgttttaacccagcctggcagagtttattctcgattagctggtggagtgtttcccgactgattttcatctgtcttcctttttaacgacggtgtgaagcatgactgcaattaacatacagggaaaatatctggattatgtgatccagacaggcaaaaaaatatagttagaatttatttgataatcttcgtgcttttaacctggtttttaaaacaaccatgcttattaaaaaataacgcgtaatagtctggcggttatttgaattcttttgttaataattcccgtgtgatattcatcaccttatttactcgttgtcatcgataccgtaatcgccacattaacactgctcgtgcaattgccatgggtgcaatttttaaggagttgttatgatccacgcctttattaaaaaagggtgttttcaggattcggtcagtttaatgattatttcacgaaaactcagcgaatcagaaaatgttgatgatgtttccgtaatgatgggtacgcccgccaataaagcgttattagatactacaggtttctggcatgacgattttaataacgccacgccgaacgatatttgcgtggcaattcgtagcgaagcggcggatgcggggatcgcgcaggcggttatgcagcagcttgaagaggcgctaaaacaactggcgcagggttcaggcagcagccaggcgttgacgcaggtgcgtcgctgggacagtgcctgtcagaaattacccgatgccaatctggcgctgatttcagtggctggtgagtatgcggcggagctggcgaaccaggcgctggatcgcaacctcaacgtgatgatgttttccgataacgtcacgctggaagatgaaatccaacttaaaacccgcgcgcgggaaaaaggcttgctggtgatggggccagactgcggtacgtcgatgattgccgccacgccgctggcttttgctaacgtgatgccggaaggcaacattggcgtcataggcgcttccggtaccgggattcaggagctgtgctcacagattgcgctggcaggggagggaattactcacgcgattggtcttggcgggcgcgatctcagccgtgaagtgggcggcatcagtgcgctaacggcgctggaaatgctcagtgcagacgagaaaagcgaagtgctggcatttgtttcaaaaccacctgccgaaactgtgcgtctgaaaattgttaatgccatgaaagcaactggcaaaccgacggtggcgctgtttttaggttataccccggcggtggcccgcgacgagaatgtctggtttgcctcctcgctggatgaggccgctcgtctggcttgtctgctttcacgcgtcactgcgcgacgtaacgcgatagcgcctgtcagcagcggatttatttgcggtttgtataccggcggtacgctggctgctgaagcggcgggattacttgccggacaccttggcgtggaagccgacgatacccatcaacatggcatgatgctggacgccgacggacatcagatcctcgacctgggcgatgatttttacaccgtcgggcgtccccatccgatgatcgacccgaccttacgcaacctgttaattgccgatctcggcgctaaaccgcaagtgcgcgtgttgctgcttgatgtcgtgattggcttcggtgcgaccgccgatcctgccgcctcgctggtgagcgcctggcaaaaagcctgtgccgcgcgttcagacaatcaaccactgtatgccattgccacggtgacaggcactgaacgtgacccgcaatgccgctcgcagcaaatcgccacgctggaagatgcggggatcgcggtagtgagttcgctgccggaagccaccttgctggcggcggcgttaattcatccgctctcgcctgccacacagcaacacacaccgtcattactggaaaacgtcgccgtgattaacatcggattacgcagctttgcgctggagctacaaagcgccagcaaaccggttgtgcattaccaatggtcgccagtcgccggcggcaataaaaaactggctcgtttattagaacgtttgcaataaggggttcccatgtttacatcagtggcgcaagccaatgctgcggttattgaacaaattcgtcgggctcgtccacactggctggatgtgcaaccggcttcttcacttatcagcgaactaaacaagggcaaaacactgcttcacgccgggccgccaatgcgctggcaggagatgaccgggccaatgaaaggtgcatgtgtgggcgcatgtctgtttgaaggctgggcgaaagatgaagcgcaggcactggcaatgctggagcagggggaagtgaacttcattccttgtcaccatgtgaatgctgtcgggccaatgggcggcattacttctgccagtatgccgatgctggtggtcgagaacgtgaccgacggcaaccgggcgtactgcaacctcaacgaaggtatcggcaaagtgatgcgttttggcgcttacggcgaagatgtcctgactcgccatcgctggatgcgcgatgtgttaatgccagtattaagcgcggcgctggggcgcatggagcgcggcatcgatctcacggcaatgatggcgcagggcattaccatgggcgatgagttccatcaacgcaacattgcttcctctgcactgttaatgcgtgcgctggccccacaaattgctcgcctcgatcatgataaacagcacattgcggaagtgatggatttcctcagcgtgaccgatcagttcttccttaacctcgcgatggcttactgcaaggcggcgatggatgcaggcgcgatgatccgcgcaggcagcatcgttacggctatgacccgcaacggcaatatgttcgggattcgggtcagcgggctgggtgaacgctggtttacggcgcctgtaaacactccgcaaggtctgtttttcaccggcttctcgcaggagcaggcgaacccggatatgggcgacagcgcgattaccgaaacctttggtattggcggagcggcgatgatcgcagcgcctggcgtaacgcgctttgtcggtgcgggtggcatggaagcggccagaaccgtttctgaagagatggcggaaatttaccttgagcgcaatatgcagttgcagatcccaagctgggattttcagggcgcgtgcctggggctggatattcgtcgcgtggtagaaaccggcattacgccactcatcaataccggtatcgcccataaagaggcggggatcgggcagattggtgcaggcactgtgcgggcaccgctggcgtgctttgaacaggcgctggaagcactggctgaaagcatggggattggttgaggaacgcacaatgacgatcatccatcctctacttgccagccgtagcgcaccgaattatcgccagtcctggcggttagcgggagtgtggcggcgggcgattaacctgatgacggaaagcggcgaactgttaacgctgcatcgtcaggggagtggtttcggccccggcggatgggtgcttcgccgcgcgcaattcgatgcgttatgcggtggattatgcggcaatgaacgaccacaggttgtggcacaagggattcgcctcgggcgtttcacggttaaacagccacagcgttattatctgctgcgtattacgccgcctgcgcatcctcaagcgcttgccgttgcatggatgcaacgcgcggaggaaaccgggcttttcgggccactggcattggcggcaagcgatccgctgcctgctgaattacgccagtttcgtcactgttttcaggccgcgctcaatggcgttaagaccgactggcggcactggctgggtaaaggccccggattaacgccaagtcatgatgacacgctgagcggaatgctgctggcggcctggtattatggggctttagatgcgcgctccggtcgcccgttttttgcctgttccgacaatcttcaactcgttaccactgcggtgagcgtcagttatttacgttatgccgcgcaaggatatttcgcctcgccactcctgcactttgttcatgctctgagttgcccgaaacgtaccgcagcggcgatcgattcgctgctggcgctggggcatacgtcaggggccgatacgctgctggggttctggcttggccaacaattattacaaggaaaaccatgaaaacactggttgtggctcttgggggtaacgccttactccagcgcggtgaggcgctgacggcagaaaatcaatatcgcaatattgccagtgctgtgcccgcgctggcgcgcctggcccgttcttatcggctggcgattgttcacggcaacgggccgcaggtggggctgctggcgttacagaatctggcgtggaaagaggtagaaccgtatccgctggatgtactggtggcggaaagccaggggatgattggctatatgctggcgcagagcttgagcgcacagccgcagatgccgcatgtcacgacggtgctgacgcgcattgaggtttcgcctgatgatccggcgtttttgcagccagagaagtttattggtccggtttatcagccagaagaacaagaggcactggaagcgacttacggctggcagatgaaacgtgatggtaaatatttgcgccgggtggtggcgtctccgcaaccgcgtaaaattctcgacagcgaagccatcgagttgttgctcaaagaggggcatgtggtgatttgcagtggcggcggcggtgtgcctgtgacggaagacggggcagggagtgaagcggtgattgataaagatctcgccgctgcgttgctcgccgagcagattaatgccgatggactggtgatcctcaccgatgctgatgcggtatatgaaaactggggaacgccgcagcaacgtgccattcgccatgccacaccggatgagttagcgccatttgccaaagccgatggttcgatggggccgaaggtaacggcggtgagtggctatgtcagaagccgtggtaaacccgcgtggattggggcgttatcgcggattgaagagacgctggcgggcgaagcggggacttgtatttcgctgtagtgatgggcaccaggcaattggcacatctagcctgatgcgatgctggcgcgtcttatcaggtctacaggcggtgtcggaacggtaggccggataaggcgtttacgccgcatccggcaagaaaatgagcatcaattaactgaacttgctctgcgcccacatcacgccgctggcatactccggcggcagcagtgggattaaggcttccagcgtcgcggtcagacgcgatgtgtcgctgtcggtcaaattcaaatgccccactttacggcccggacggacttctttgtcgtaccagtgcagatgcacaagcggcagtttcagccagtcataattcagatcgctaccaatcagattgatcatcaccgacggattattcactactggttgcggtaacggcagatcggtaattgcccgcagatgtagctcaaactggctgatgctggcaccgttttgcgtccagtgaccgctgttatgcacacgcggagccagttcgttgatcagcagaccttgtggggtgacaaaacactccattgccatcacgcctacatagctcagctcctgcataatcgccgacaacatctcttcagcttgcgcctgcagctgtgcgttggcctgcgggaaagcgacgctggtgcgcaaaatgccgtcctgatgcaggttatgcgtcagcggataaaacacggtgctgccatcaaaaccgcgcgcgccaaccagcgacacttcaccagagaagtttatgccctgctcgacaatacattcgccgtagcattcagcaggtaactgttcggtttcatcggcgcgtaaacgccattgaccgcgtccgtcatagccaccagtgcggcgcttaacaatcgccagctcacctaaacgatcaaacaccgcaggccactcgctgcgttcggaaagtaactgccacggtgcggtcggcaggtggagcttatcgaaaagctgcttctgagtcagacggtcggcaataatcgggaacacatcgcggttcacaaaggccggatggcgcgccagctcgcgggttaatgcagtttccggccagcgttcgatctcagcggtaatcacgctttgttgaaaaggcaccgccgccggttcagcgtccagcccgaccggccagacagcaatgcctaacggttcgcctgcctgacgcagcatacggcctaactgcccgttcccgaggacgcaaacctgtttcatgccgcacctcgcgggtccgggttttccagcacttcatcagtttgtgctttgcgccagtcattcagacgctggtgcagttctttatcatgattcgcaagaatttgtgctgccagtaacgccgcgtttgccgcgccagctttaccaatcgctagcgtacccaccggaatgccgcgcggcatttgtacgatggagtagaggctatcgacaccgctcagtgcggcgctctgtactggcacgcccagcaccggcaccagcgttttggcggcaatcatgccaggcaggtgcgctgcgccgcctgcgcccgcaataatcacctgataaccgttctcttcggcgctttcggcgaagctgaacagtttatcgggggtgcggtgagcagaaaccacttcaacgtggtgcgggacattcaggatttcgaagatttcggcggcgaactgcatggtagcccagtcgcttttggaccccatcacgatggcgacacgcgccggattattgcgggaagacatgcgtcttaaaactcctgtggtgcacaactctcggctttagagggcacagagaatagcacggaaagagtgcaaggaaaacggttgcgtaggcggaattaaccgtcagttgttgagtttttaatttgttctgcgtgttgattatgcgctctggctgaactggcaaagaatgcccatatcaacacaatgctccatggaaaaaagcaaataccgacaatcaatataaatctttctacaaaacgttggttatgggggcgggtgagtactaaataaatgagccagaaatagactatccaggaaatgaccgccgcagctaccagtgacaatgcgccaaaatagaagccgacaagaccgaaccagctaatacacagtggcgctcctgccgtaagggcgatgccagaaatcaaaaatccgttgcagcgttgcataataatattccctgttgttatttcactcagagattattaccttgctgattttaaaaaagatatacaggttgcgttagttcggtgctttttcagaatctgtccattcgtggtcagaaaggaaaatggattagctcaacgtcatccgccgtgactttcaccatcgaaccttctgtatgccaggcacccagtaccacgcgaaaagccgtttgctgattggcgataagttcatgcaccgccgggcgatgggtatgcccgtggatcagccattgcacttgatgtttttccatcgcactgaccaccgcgttttggttaacgtccatgatcgccagcgatttactgctgttggcttctttactgttcgcgcgcattcgcgcggcaatgcgtttgcgcacaaacaacggcagggcgaggaatagcgtttgcagccagggtttgtggactttggcacgaaaagcctgataacccgcgtcatcggtgcacagcgtgtcgccatgcataatcaacacccgacgaccataaagttcgagcaccttttcttccggcaataacgtcatgccgctttcacgggcaaagcgtttgccgagcagaaaatcacggttgccatgaatgaaataacagggaacgccggaatcggataccgctttgattgctgcggccatctggtgatgaagtgggttgggatcgtcgtcgccgatccaggcttcaaacagatcgccaagaatatacagcgcatcggccttgcgggcctcccccgctaaaaaacgcagaaaaccggcggtgatcgccggttcttccgcgcagagatgaagatctgcaataaagagtgtcgccacgattactcgctaacggtcacgctttcaatgataacgtcttcttttggcacgtcctggtgcataccgctacgaccggttgcaacacctttgattttgtctaccacgtccatgccttcaaccacttcagcaaatacgcagtagccccaaccttgcaggctttcgccagagaagttcaggaagtcgttatcaaccacgttgatgaagaactgggcagttgcagagtgcggtgcctgagtacgggccattgccagcgtaccacgggtatttttcagaccgttgttggcttcgtttttgatcggttctttggtggctttttgtttcatgcccggttcaaaaccgccgccctgaatcataaagccgttgataacacggtggaaaatggtgttgttgtaaaaaccttcgcggcagtagtccaggaagtttttaactgtttcaggtgctttatcgtcaaaagttttgatgacaatatcgccgtgattggtgtggaaagtaaccatttttgcatcctgttccgtttgattggtgcttcaacccggttcgggtcatatatagggtggtgttatagcataaccgcacgatcggatcatctcgcaatgtatgctgattcgcgcgggaaatatgggtattatacgcaactcaattacccacacatgtctaaacggaatcttcgatgctaaaaatcttcaatactctgacacgccaaaaagaggaatttaagcctattcacgccggggaagtcggcatgtacgtgtgtggaatcaccgtttacgatctctgtcatatcggtcacgggcgtacttttgttgcttttgacgtggttgcgcgctatctgcgtttcctcggctataagctgaagtatgtgcgcaacattaccgatatcgacgacaaaatcatcaaacgcgccaatgaaaatggcgaaagctttgtggcgctggtggatcgcatgatcgccgaaatgcacaaagattttgatgctttgaacattttgcgcccggatatggagccgcgcgcgacgcaccatatcgccgaaattattgaactcactgaacaactgatcgccaaaggtcacgcttatgtggcggacaacggcgacgtgatgttcgacgtcccgaccgatccgacatatggcgtgctgtcgcgtcaggatctcgatcagctgcaggcaggcgcgcgcgttgacgtggtcgatgacaaacgtaacccgatggacttcgttctgtggaagatgtcgaaagagggcgaaccgagctggccgtctccgtggggcgcgggccgtcctggctggcacattgaatgttcggcaatgaactgcaagcagctgggtaaccactttgatatccacggcggcggttctgacctgatgttcccgcaccacgagaacgaaattgcccagtccacctgtgcgcacgatggccagtatgtgaattactggatgcattccggtatggtgatggttgaccgcgagaagatgtctaaatcgctgggtaacttcttcaccgtgcgtgatgtgctgaaatactacgatgcggaaactgtgcgttacttcctgatgtcgggtcactatcgcagtcagttgaactacagcgaagagaacctgaaacaggcgcgtgcggcgctggaacgtctctacactgcgctgcgcggcacagacaaaaccgttgcgcctgccggtggcgaagcgtttgaagcgcgctttattgaagcaatggacgacgatttcaacaccccggaagcctattccgtgctgtttgatatggcgcgtgaagtgaaccgtctgaaagcagaagatatggcagcggcgaatgcaatggcgtctcacctgcgtaaactttctgccgtattgggcctgctggagcaagaaccggaagcgttcctgcaaagcggtgcgcaggcagacgacagcgaagtggctgagattgaagcgttaattcaacagcgtctggatgcccgtaaagcgaaagactgggcggcggcagatgcggcgcgtgaccgccttaacgagatggggatcgtgctggaagatggcccgcaagggaccacctggcgtcgtaagtaattgcgctattgccggatgcgagttttcgcatccggttatcgcctgcgccaccacaacattcccatcagtagcatccccggcaaccacacccacatcaattcagaaataatcacctgatgcccgtacggcgtggtgtaacgagacaatgcaaacggcgcgactttaatcacctgccagggagcgaaaaagcgttcatctgaccacggccatatccagccaacgcctttaccaccagtggttaccgaatccagcaagctgtgcgatagcaatgagacggttaaaaacagccagcagcgaatcagcccagccctgaaccatcgacgtccaatcagcacacataacagcgggacaacaaacgcaaacaccagcgaatgggtaaacccgcgatgaccaaaaacgttgccgtaagcaacgccaaatttaaacgataatacgtcggcatcaggcaacatcgccaggacgattccggcaaataacagacgcggtgggatggctttctaacccaaccctaaaccaatgcataggggaacggcggcgtgcgtaataacggttggcatgatggtcgcttcggcaaaatgtcgatgctatcagcatggatgaacggggcgtagagggcaaaagtctgaaaagagaaccggcctgttgatacaggccgggaaagggatcaggcaacaacctgtacggtgtgacctgcaaaactcactgtctgaccggcgacaattttgcagcgtttgcgcgtttcaaccgcaccgtcgactttcacctggccttcggcaatcgcgattttcgcctgcgcgccgctttcgctccagccttccagtttcagcaagtcgcacagctcaacgtgcggatgtttacctaaagaaaatgtcgccatgttactcaccctgtggatcatgatattcaacgcacgcctgtagcgtgttttcaatcagcgtggcaaccgtcatcgggccaacgccgcccggaacaggcgtaatgtatgaggcgcgtttagccgcgtcttcaaacacgacgtcgcccacaactttgccattttccagacggttgatgccgacatcaatcacaattgcgccttctttgatccagtcaccaggaataaagcccggcttgccgacggcaacgatcagtagatcggcattttctacgtggtgacgcagatttttagtgaaacggtgggtcacggtagtggtgcaacctgccagcagcagttccatgctcattgggcgaccgacgatattcgatgcgccaatcaccacggcgttaaggccaaaggtatcaatgttgtaacgctcaagcagcgtgacgataccgcgcggggtgcagggacgcagacgtggcgcgcgctggcacaggcgaccgacgttgtaaggatggaaaccgtccacgtctttgtccggatgaatacgttccagcactttgacgttatcaatacccgccggtaacggcagttgaaccagaatgccatcaatggtgttgtcggcattcagcgcatcgataagctccagcagctccgcttcgctggtggtttccgggaggtcataagagcgggagacgaacccgacttcttcacaagccttgcgtttgcttgcgacataaatttgcgatgcagggttgctacccaccagcacaacggccagtcctggcgcccgcagtccggctgcaatacgcgcctgaactttttgagcaacttcagagcgcacctgctgcgcaatcgttttaccgtcaataatctttgctgccatcagagagaggattccatctgttacgtaggtcgaaggggatgtgtctattttgtcagaagcgtggcgcgctgtcagttttcgttttctgaaaagtaaaaccttctgtacctggctgattcacacctatcatgataaccgtcgttggtttgccgccatagtgagctacatcagatgcggtcgtacacttgttcagcaactggttcaaaagccattgactcagcaagggttgaccgtataattcacgcgattacagcacaccgtggtatcaatgcgcccttagctcagttggatagagcaacgaccttctaagtcgtgggccgcaggttcgaatcctgcagggcgcgccattaaaattcaatcagttacgccttctttatttcttctataattccagagtgggacattatcaccaaaaatgtcgtctattttcctcgcgtgctcagtcaaatgattaggcgcaaggtgagcatatctacgaaccatttctctggactcccatccgcccatttcctgaagcactgataatgggacgcctgacggaatcaacctgcttgtccgggtatgccagaggtcatggaaacggaaattttcaactcctgcacgacgacaagctgatagccatgctgtcttgctgtcaatgcgcatcttcctgagcgcaggcattgatgttccatctgctcgcttagccgccctggtatgtacacccacatttgtgatgcttgcctgtttgatcatgcagcactttagaggcggtatcgttcagcgccacaccaatggcgcgatttgatttgctatcttctggattcaccctggcaacttgtcgctgcatgtcaatctgttgccactccagatttatgatgttcgactttctcagaacagttaccagcgcaaacttgacgacagatttcagtggcttggggctctcatcaatcaggcgtttttcctgattcttttgtaagtctcttgtgccattccacctcatacaggtttgcctgcaaacagtactgatattgcactgccagatattccggctggcttcgtggttgttttcaacagtgatgaggcatcgtggcatctcgttgaagaccatcggggtaaaacggtttatgacgtggcatcaggggacgcgttatttatttctgagctcggtccgttaccggaaaatgttacctggttatccccggcaggggagtttcagaagtggaacggcacatcatggataaaggatacggaggaagaaacctcgttgctggaagcctgtaagatgtatcgggtgttgctgaaccgagttgatacatcaactgcccctgatattgagtggcctgtgaaccctgtcagagagtaatcattgggattatgccgcagcacgtcgtgcgcaagaacgtgctgcggctggatgctattttttccctgaagcggaaaacattactacagtacctttaaccttggttttaacattctcgaaatgctctgagagtatatgtgttaagccttcttcggaatcttttgtgtttgaaaagatgcctttctgattgtaaatgcgcatcagtttttgaccgaagctattgtgcacaacgccgtcaccaagaattgtggctccgtatagagttccatcgtcagttaaggcctgcgccgcattgcgtattacacagctttttgtagatatatttccaggcaggcagtgaagaaggtaaaacatggaaatggaatcaaattgaccatgtaacgccgcgggataaggatcaaaaacatcatggctaattttatgtttaatttttgattccccagcccttgtcgatgccgcgttcaggctagcttcgttcaaatccattaaagatatcagactactctcaggtacgtgagtaaggtaaaacccagttccaacgccaatatccagatggttgttacctaaatgttccagaaagtgtggaagaaggtgttcctttgtaggacatccccatgcaagccgatttgatactcccaaaacccaccagtcataaagctttagggtaagtggtgtgtaaattttagccccatcatctgtgttttttttcattagtttcaccgtgttatagttttatttgtgaattaaatcaattatagagatgaattacaaggggttaaatgatgccacggcataacgaatttgaatatattgggtcttgtgttgcggtaagaggttacacgccaggacgcaggttaaatgcttacaatattaggggatattgtttgcttttaacggtaaacaaattccccggggctatacaataccaccggggagaaaatctatttaacgttgttaaaaggtgtacttaagaccagcagtagtgatgaagttatagttttctatgcctgcaccatttttgctgtagtcagaagtgttatcattgtgatcataaagtgaagtatcaccttttttattcgtaacccgattccatgcgccttcaatataaacttttgcattaggcgttacgtaataacctgcattgactgcaacagaatagtaattttggtctttgactttactgcgataagtgattctttttcctgggtcatagtgttcatcgttatcaaatgcttccacccagccgctgtatttaaatgtaccacctagctcaaaatcttcataacgataacttccagtcaagccaatgtagggcattttaaaacgttgtttgtagccgattgctctttctccattcgggaaggagccgatatcatctctgaatccctcctcagaactgtagatataggaaccccctctggctgtaaagctataacggctttcctgatatccggccatgagtcccaggcggtaattgggttcgttgaggagccagcctttgatattcagatcaaattcgttggcataattgagttgtgtatcagggtgtctactttcatccgtccaggttccggggttactggaatccatccagtcccgatcgaccatattgccacctcggctaccgagagttgtccagccagcagccccgatagatatctggggcatcaaatcccaattaattgcacctttaataattgcagcgttattgaatttccagtcaagttgactgacttttcggcctccttcttcggctagataaacacgctcttttgtttttccgctcagagttccaagactaatgtccgcatttatgttgtcaggagtaaacgataaagtctcggtagaagcaaaagagctgatcgcaataggggttgtcaggactattcccagaagtttcgcccgcataaaaggtctccattcaatcgttttaatgattgagtatgtattttttatatctaacttaatgagtcaattgtatattgccccactgtttatattttgtttaacattgaatttttgtcacaatgcgctgtcagttttttagtttaattgtctgtttgtgttttgtattgtggttttatgggctaattatttttttctttgtggagtttttatctattcaagtgccatgcctttagatgcatattagcgataatagcatgaggtttatcctcaattgctgtgttttttagtataaaaaagaggaacaaaactgagacacataaggcctcgcaatggcttgcaaggttttacatattttgaggtggtggaacgtgtgaacgcagagatggcgcggtaatttgttgatttaaaatgtcgttcttggagtttctaagtcgtgggctacaggttcgaatcctgcagggcgagccatttcctcgccatttatttgttcccttttacaaattacaccatcactttgttgtcgcggttttgctaaataattggaacacgtcagacgaataaaatgaaaacagaaattctgctaaacaattcatcttgccaggattttgattaggaaagtgaaaaggaaaggagcaagctaagttgctccctttaatcattaatactcaaggatactctgcgcggcgggcaaatagcgcagagagaaatagagcgtgtctttaccgcaagaggaacgtttcgctaacagcgaggcaatttctgcgttcggtttcggtttcgctgtaaacgttttacctttaccagcgacaaacagttcataaacaatgccgcttgctggggcggaactttggcaatcggcgctggcctgtagataacgttcacgctgttcagcggtcagtttatccacgccgctgccatcctgtacccagacattaacaccggttgctttaacttgttccagcagttggcgatagccatctggcgacatgtttccggcgaaaaaactactgatataaaccggttttgctgaaacatcgctaatcaaccgctgcgcgttgtttaaccatgttagcaaaggctgacgggcggcttcgctgcgccagttcaggtcgtcaatttccgcgctgatgtaccagccatccggcgttacgccaggcacggcgctccataatctggcttgctggagatcggcagccagcaggcgattaagatagctttccagcgctgcggacgactgtttctggtgcataaaaaattccggatcggcgttcagcccgacaatcagcttcaggccagcctgttgcgcagctgtagcacgcttaaacaataacgcgcgctgttctggctgggtgaatgcatcgccgtaacgggtccattgcaaaaccagggtatcgaagccttgcaaacgtaactgactcatcagcccctgccactgggtatcggtaacctgactatcacggttttgtggttgccagataatacctttcatcgcaaaggaaaaagggctgaccaaaagcagtgtcaacaatacgaaaatgaacttacgcatttaccagtgcactccaatggtgagaaacgcgttgttgcgctctccgttacgttgattaatcgccttaaaggtatgttgatattcgacgccgagactgactttgtgcggccaggcgtcgtagtgcgtctcgccggtccagatattccagcggaccccgacaccgccaagctgcgcgccctgagtgcctttatcacgataaccgttgtcctgaacgtgagcgtaaggctcaatagtctgtccgttcgccaccttctgatgccagcttacgcgataatctgccgtccacgcctgaatatcctggcggacatattgcgccgcatcgaggtacaggttttgggcaaaccagcctgaaccgttcgggtgccattcgtcgctgtatttgccgccattaaagaatgaggcgctggcgcgcagcatggtatcggatgcgccattttgcccgttcagcggcaactgctgttcgacggcgaggaaaaagatctgatcgcgcagcggcttccagcgcagaccggtgccggacatcggatttttcaccggcatcatcaccccgttttctccggtatcggcaaagacgcggctataaactgagagcaggtcgccttccagcagcatattgcgtccgaggcggtactcggcttccagttgcccgtagctacgatagcttttccctggcgctgcgccgccgacattattgttagcggtactcattgcgccggaacgcaagccgatagaagaatcgaaactgaacgtccagcggcgaccgacctcctcatgcagacggcggaaattgaagcgttgctgattttgctctggagtcagtggggttatcagcgcctgattatcaatgtcatcaatcaccagccgggcgtagtgctgcgtcgcaggcatgtcatccagacgctggttcacgtaggccagttgtcggataagtgccggatcgtccggtagccctttatgcgcctgttcgagcatttcccgcgactgtgcgatatcaccgctatcccacaaggcgtaaccgagcgctgcctgggtgttgctattattcggttccagttccagcgcggcgcgcaaatcactcaccgccgccgggacattatgacgttggcgataaattgtcgcccgcgcaacgtaagcgttggcagaaggcgcaatattgattgagcgcgtgagatcgttcagtgcaagttccggctgaccaggaatgtaacgttgcgcatgcagccaccagtagagggcattgtttcccagcccacgttgttctgcctgctgaagccagcgatcgcgagccgcaccatttcctgccgcctgggcggtattggcagcagcaagcagatcctcattgctcatgtcgtgaagactgattttctgccaggccgccagtgcggtggcgtagtcctcaacctgatacgcctgataggctaccgcacgatgttgccaggcgtccggttgtcgttgttcggcctgaagccatgcatacaacgccacaccgggtagcgtgtcccgataacactttgccagacggttccaggcggcggcatcgtaggaaggcgacatatcgcccagcaagcgaactattgccgggcaattatctgcaatacccggcaactgactttgccactgacgttgctccgccagcggtaagggtttcgataaaatcgccaccttcgccggcgttgccaggtaaggatgactttccagcagagacgccagtcgcgccattaaagtctggctgacacgcgcatcgccctggaaaggatagcgttgcagcaataaatcggcagcttcgcgtgactgttcgttctgcatcagttgccaggtcagttgatccaggcgggtaagatttgccggttcttgctgatacagcaatcgtgccagacgcagagcttcagccttgttatgggtcgctacgctaacggtataacgctcctcaagcatttcattggcggggagggtggcgagcagtttttgcgctgcgccgtactgaccttcttttaacagcaccggtagcgtcgcgccaacaacatactggcggttgtcggcaaactgtaccgtataattcgccaacgcctgaacggggttgccgctgtatttagataacagatagagccaacttttctcttgtgcgtccgtggtaaatagcggcgtattttcaatgagataatgctggaggcgtgctttttcgccacgataagccagcgcggtcgcgtaagtaatatatgactgaggatcggtgaagatcccctgtgattgcagcgccaggatccgatcgtccaactgcccggcaagaagcacgtcaaaccactgacggcgttctgccgcgcttaatgtgttctgctggcgtgcttcattgtatagcgtatctgcctgggaccattgtttcaggtagattgcgcgttgcagcagatcggttcgcagcgtttttccttccggcgatgcagcaaacgtcgcatcgttcagttgcgctctggcgacaggtaattgtgccagccgcagggcattctgcccgacttcactgcgacaacgcagggtcggcgcagcatcgcacgctttttgctgggcaagcagttcttcaacagtcgtaacgcttttcacttcaacaggaatagccgccagactgcgctcaagccgatcatctccagggtgacgtttcagttgatcctcaagcaacagccgcgcccggtcatcatgaccaaaatggcgataggcttccgcaaggtataaagtcagcggaatattatccggcacctgctggtgtatatattcaaattcgcggatggcggttgcttcgtcgttatttttctgtgccttcagcgccttatcgagacggggataaataacaaaatggcgataatcgctcagccccagctcttctgcgctggtgccgatattgtctgcgagtgcgctggtactcaataaagatgtcagcagtaaaccagaccatccgatgacgcgattaaggttattctccttcattttcggactccagttgtgcaacctgttcagtgtttaaacctgctttgagtaatagtgattgcatcgaaacttgtaattcgcgttgaattgtcaggacgcgatccaacgtttcctggctgataacgccttcggtgaccaaaaacttgccgagcggcagagaactgcgttcatggcgcaataacaacacgttaattgctgaacgattaatatgaccgagcgtggtcagtatttcggcgaacaggaactgatgcggcacatattgccgccagatttcaccggcctgctgttccgtgagccactgatgctgaactgcattgtacaacattgcccgcggatcgtgaccgcgtcggcgtgcataccagtggcgtaatccggtgacaatttgtccccgcagaacaatgacgtaacgcactttgcgtccgactttacgcgtcagggccgccagcgaaaccgggtcaataccatcttcactgccgacaattaactcatcattgtccagacgcagcggcagtaccgcataatgcagcgccacggaggccggcatttcggcaatcagcgaggaagggatctgccaggcatcgatggattcccacgccacgccgttttgctctgccagcgcctgtgccagttgctcggcgctaatcagcccctgcatcagcattgaaccgcccaggcgtagaccttcgacgcgattacgcagtgctgtatcgagttgttcttcagtgatgacctgattttccagcaggatttgacctaacggacgcaacgagcgggtatcgccagtcacgctggggaagtcatgcgttgttttatcccacgcgacgcgacgtggatcgccgtgttgaagtacctgttttaacgcgcgccagttggccatgaagttaatcaggttgccccagaaaagacgcaggacagatagcagcccctgcgtcaggccgtagtagccagtaacgaaaatcacccgctgcacgatgcggttaatcatcaagccaaagtttagccacagcagagtcattaaccatgcgctgccgctgaaaatagaaaggaaatgccaggcatcgggccacaaactttcatacgccagcaacagcaaaagctggatcatcaccagcatcgcgaggaagctgacaaagttactgattgcccctttgcggtcgcgccagagaaagtagttcagcgtcaggctggaggtccatttgtgggttttaaagccctggaaaacaatgccgatgatccagcgagatttttgccgaaccgcagtcgaaaaggtatcggggaaatattcgcgcacgcagatcatgtttgacgtccgtgcatgctgtaaaaatttacgctgctcgcgttctttggcttcgtccaccaccggaaaacggacaaaaatttccgtcatacctttctctttcaggcggaagccaatgtcgtaatcttcagtcagactctgcacgtcgaaagcaataccgtcaccgtcagctaacagtgcggtcacggcgcggcggctgaaacaggtgccgacgcctgcgctgggcacctgtccggcgagggcttcacgcaccggaacatctttgccatgcagttctgaaaactcatcaatgtaggtcatgctggtgaagtgcgtccattcgcgttcgaacggatacactgggatctgaatcagatctttacgctcgaccagatagttgaacagacgcaattccatcggtgaaatcacatcttcggcgtcatgcagaataaaaccagcaaaagcgaaattggcgctacgttcaaattgggtgatggcgtccagcacgttgttcagacagtcggctttgctggtggggccaggacgcgcgcagactaccttatgcacgttcgggaagcgagcgcacacttcgtcaacatcacgctgagtatcggggtcgttggggtaggtgccaacaaagatatgatagttttcgtagtcgagcgtggtcgccgccagctcggccatattgccgatgacgcccgtttcattccacgccggaaccataatcgctaacggtttttcatctggtttatacagttcgcggtaactcattcgcgggtagcggcgataaacactcaacttgcgtttaatgcggcgtacccagtagacgacatcaataaaaaaatcgtccagcccgctgatgaacataatgaccgctaacgttatcgcgattacttttaagccgtagagctaggtagcaaaaacatcaagaagccagtccacacaaaaaccttacattaacgctggttatgtttagggtggcgtatattaaggttttttatgaattgtgacagctttttatcattaataggtattactattgcggcatgttatttttacactggttataaaagttgccgtttgctgaaggattaagcgggtaatatgataacaaaccttgtcccccgcacatctgacgttactgcaactgtgcctttatgcgcgacaacaatcgatttcactatcgccaggccaatgccgctaccttcgccttttcgctggcgggaaggatcaacgcggtagaaacggtcaaacaatcgcggtaagtgttcgggcgcaatgggcgtaccggggttttcgacggtaacttgcaccaggtgatcgaccgtctggcagcgcacaacaattgtctctccggttggcgtataacgcagggcattagaaagcaggttgcttaacgcccgacgcagcatcagcggatcgcccgcaacctgacactcgtcgccaacaaaccgcagctccacgccgcgatcttctgctaacgcctcgaaaaaatcgaacactttgccgacttcatccgccaggttgagcattttcttttcggggattagctggttgttatcggcctgagcgagaaacagcatatcgctgaccattttcgccattcgcgtcagctcttcgagattagagtagagcacatcttccagctccttctggctgcgcgactggctgagggcgatttccgtttgcgtaatgagattagtaataggtgtgcgaatttcgtgggcgatatccgctgagaaattggactggcgggtaaagacatcctcaatacgctcgatcatatggttgaacgacagtaccagctgttccagctcaatgggcacggtctgcgggtcaaggcgaacgtcgagatctttcgaggtgatattctggatttgacggctgacgctgcggatcggcgcgtgacctttatgtaccgccaacagcacgataaagacgatcaggatgctgattaccgatgcggtcataataagtttattcatcaaatcattgatgtaatgaagatgaaaatcgatcgaaagcgcaatgtagagcgtataaatcggtttgccgtcaaccagcgggccaaccggcaagttaatcatccgccagttgctgtgttccatatgcccgtgaccgtgccctggcatcatcatcgttgggccggaaaggagatacacctcgccgccctgcgcgtctttatcgggtatggcgtcacgcgtaaactcgcggatatccggcgcaccgggggagtgatacaccgttttaccgtggctatctgccagagagatcaacacattggaataaccactgacgatatcttccagcgtcattaagcgtcgggcttgcgtttcgtcagggtgattaagtacccgttcaagggtggcgctaatctcttttaaatcattaatatcctgctcggcaaaatgcacttttaccgagtggatcatgatccatgcaaaggcgaaaaacgccgcgatggtggcgaggctgataaaaaaggtcaggcgagttgccagcgaaaacgggcgctgaaatggtttactgaccatccggcacctctagcatgtaacccacgccgcgcacggtctgaatcaactttggctcaaagtcgttgtcgattttgccgcgcagccgcttcaccgccacatcaatggcgttggtatcgctgtcaaaattcatgtcccatacctgcgaggcgataagcgagcggggcagcacttcgccctgatggcggaggaaaaactccagcagagtaaattctttactggtcagagtgatgcgcgtgccgctgcgggtgactttgcggctgacgagatcgaccatcagatcggcaacctgaaactgactttcgataatcaccgccgccccgcgccgcagtagagtgcgcacccgcgccagcagttcagcaaaagcgaacggcttcaccagatagtcatccgcccccaactccagccccttgacgcgatgttcaatggtgccaagcgcggtaagcaacagaatcggcatccccttattggcggaacgcaacatgcgcacgatatcccagccgttcacgtccggcagcataatatcgaggattatcagatcataatcaccggtcatcgccagatggtagccattcagcccgttgtcggccaaatcgaccacaaaaccggcttcggttaaccctttggtcaagtattctccggttttcttttcatcttcgacaatcaacagtttcatatttcctccgcatgttgcccgggcaattctagagtagcgggatcagatggcaatcgcttattggcaaaatgacaattttgtcattttcctgtcaccggaaaatcagagcctggcgagtaaagttggcagcataaaatcaccagaaattatgagcctatgtctccttgtaaacttctgccattttgtgtggcccttgcgctaaccggttgttcactggcaccggattatcagcgtccggcaatgcccgtgccgcagcagttctcactcagccagaacggcctggttaacgcagcagataactaccagaacgcgggctggcgcaccttttttgttgataatcaggtgaagacgctgattagcgaggcgttggtgaataaccgggatttgcgcatggcggcgctgaaagtgcaggaagcgcgggcgcaatatcgtctgaccgatgccgaccgctacccacagctcaatggcgagggcagcggcagctggagcggcaatcttaaaggcgattcagccacgacgcgggagttctcgactggccttaacgccagctttgatctcgattttttcgggcgcttaaagaacatgagcgaagccgagcgccaaaattatttagccactgaggaagctcagcgcgcggtgcatattttgctggtttctaatgtcgcgcaaagctatttcaatcagcaactggcgtatgcgcaattgcaaatagccgaagaaacgctgcgtaattatcagcagtcatatgcgtttgtcgaaaaacaactgttgaccggtagcagcaatgttctggcgctggaacaggctcgcggggtgatagaaagtacccgcagcgacatcgctaaacgtcagggggaactggcgcaggcaaataatgcattgcaactgttattgggaagctacggcaagctgccgcaagcgcagacagtaaacagcgacagcctgcaaagcgttaaattaccggcgggcttgccgtcgcaaatcttattgcagcgccctgatattatggaagctgaacacgcgttaatggcggctaatgccaatattggtgctgcgcgtgcggcatttttcccgtctatcagcctgaccagcggaatatcaaccgccagcagcgatctgtcgtcattatttaacgccagcagcgggatgtggaattttattcctaaaattgagatccccatttttaatgccggacgcaaccaggccaatctggatatcgccgaaattcgccagcagcagtcggtggtgaattatgaacagaaaatccagaacgcctttaaagaagtggcagatgcgctggcattacgtcaaagcctgaacgatcaaatcagcgcccagcagcgttatcttgcgtcgctgcaaattactttgcaacgggcgcggacattatatcagcacggcgcagtcagttatctggaagtgctggatgccgagcgttctttatttgcaacccgacaaactttacttgacctgaattatgcccgtcaggttaacgaaatttctttatataccgccttagggggcggttggcagcaataatttttaactccaggagagaataaatgaaaaaagcactgcaagtcgcaatgtttagtctgtttaccgttattggctttaatgcccaggctaacgaacatcatcatgaaaccatgagcgaagcacaaccacaggttattagcgccactggcgtggtaaaaggtgttgatctggaaagcaaaaaaatcaccatccatcacgatccgattgctgccgtgaactggccggagatgactatgcgctttaccatcaccccgcagacgaaaatgagcgaaattaaaaccggcgataaagtagcgtttaattttgtccaacagggcaacctttctttattacaggatattaaagtcagccagtaacccaggtttaatgagatgaaaaaaatcgcgcttattatcggcagcatgatcgcgggcggtattatttctgcggcaggttttacctggtttgcaaaggaggaaccgcccgcagaaaaaacgtcgaccgcagaacgtaaagtcttattctggtacgacccgatgtatcccaatacgcggttcgataaaccagggaaatcgccgtttatggatatggatctggtgccgaaatatgccgatgaagagagttctgcgtctggtgtgcgcattgacccgactcagacgcagaatctgggggtgaaaacggcgaccgtcacgcgcgggccgctgactttttcccagagtttcccggcgaatgtcagttacaacgagtatcagtatgccattgtgcaggcccgcgccgccgggtttatcgacaaggtgtatccgcttaccgtgggcgataaagtgcaaaagggcgcgccgcttctcgacctgaccattcccgactgggtggaagcgcagagtgagtatttactgctgcgcgaaaccggcggtacggcgacccagactgaaggcattcttgagcgactgcgactggcgggaatgccggaggctgatattcgccgcctgatcgccacgcaaaaaatccagactcgctttacgctcaaagcgcccattgatggcgtgatcaccgcgtttgatctgcgcgcgggaatgaatatcgccaaagataacgtggtcgcgaaaattcagggtatggacccggtgtgggtcactgctgcgatcccggagtccatcgcctggctggtgaaagatgcctcgcagtttacgctcaccgttccggcgcgacctgataaaacactcaccatccgcaaatggacgctgctacctggcgtggatgctgcgacccgcacgctgcaactgcgtctggaagtcgacaacgccgacgaggcgctaaaaccgggcatgaacgcctggttgcaactcaataccgccagcgaaccgatgctgctcattccgtcacaggcgctgattgataccggcaacgaacagcgggtgattaccgttgatgctgacgggcgctttgtaccgaaacgcgttgccgttttccaggcatcgcaaggcgtcaccgcgttacgctctggtctggcggaaggtgaaaaggtggtttccagcggcctgttcctgattgattctgaagccaatatttctggcgcactggagcggatgcgctctgaaagtgctacccatgcgcattgagggaatagccaatgattgaatggattattcgtcgctcggtggcgaaccgttttctggtgctgatgggcgcgttgtttctgagtatctggggcacctggactatcattaacacgccagtggatgcactgccggatctttccgatgtgcaggtgattattaaaaccagctatcccggtcaggcaccgcaaatcgttgaaaatcaggtgacttatccgctaaccaccaccatgttgtcggtgcctggcgcgaagactgtgcgcggtttctcgcagtttggcgactcttatgtgtatgtcattttcgaagatggcaccgatccgtactgggcgcgctcgcgggtgctggagtacctcaaccaggtacagggtaagctgcctgcgggagtcagcgccgagctggggccagatgccacgggtgttggctggatctatgaatatgcactggtggatcgcagcggtaagcacgatctggccgatttacgctcattgcaggactggtttctcaaatatgagctaaaaaccatccctgacgttgcggaagtggcgtcggtgggcggtgtggtgaaagagtatcaggtggttatcgatcctcagcgcctggcgcagtatggcatcagtctcgccgaagtaaaaagcgcgctggatgcttcaaaccaggaagcgggcggttcgtcgatcgaactggcggaagcggaatatatggtgcgcgccagcggctatctgcaaacgctcgacgactttaatcacatcgttttaaaagccagtgaaaatggcgtgcccgtttatctgcgtgatgttgcgaaggtccaggttggcccggagatgcgccggggcattgccgaactgaacggcgaaggcgaagtggcgggcggggtggtgatcctgcgttccggcaaaaacgcccgtgaagtgatcgccgccgtgaaggacaaactggaaacgctgaaaagcagtctgccggaaggcgtggagatagttacaacatacgatcgcagtcagctcattgaccgcgccattgacaacctcagcggcaagttgctggaagagtttattgtggtggcggtagtctgtgcgctgtttctctggcatgtgcgctcggcgctggtggcgattatttcgttgccgctggggttgtgtattgcttttattgtcatgcactttcagggactgaacgccaatattatgtcgttgggtggcattgcgattgccgtcggggcgatggtcgatgccgctatcgtcatgatcgagaatgcgcataaacggctggaagagtggcagcaccagcatcctgacgccacgctggataataaaacgcgctggcaggtgatcaccgatgcatctgttgaagtggggccggcgctgtttatcagtctgctgattatcacgctgtcgtttatcccgattttcaccctggaagggcaggaggggcgtctgtttggcccgctggcgttcaccaaaacctatgcgatggcgggcgcggcgctgctggcgatcgtagtgatcccgatcctgatgggctactggatccgtggcaaaattccgccagaaagcagtaacccgctcaatcgctttttgattcgtgtttatcatccgctgttgctgaaagtactgcactggccgaaaaccacgctgttggtggcagcgctttcggtgctgacggttctctggccgctcaataaagttggcggggaatttttaccgcagatcaatgaaggcgacttgttgtatatgccatcgacgctgccggggatttccgcagcggaggcggcgagtatgctgcaaaaaaccgacaagctgattatgagcgtacctgaagtggcgcgggtatttggcaaaaccgggaaagcggaaaccgccaccgattctgctccgctggaaatggtagaaacgaccattcagcttaagccgcaggatcagtggcggcctggcatgacgatggacaaaatcattgaggaactggataacaccgtgcgtctgccggggctggcgaatctgtgggtgccgccaattcgtaaccgtatcgatatgctctcgactggcattaaaagccctatcggcattaaagtttccggcactgtgctggcggatatcgacacgatggcggagcaaattgaagaagtggcgcgaacggtgccaggcgtggcttctgcgcttgctgagcgtctggaaggtgggcgctatatcaacgttgagattaaccgtgaaaaagccgcgcgttacggtatgacggtggcggatgtgcagttgtttgtgacttctgcggtgggcggggcgatggttggcgaaacggtggaagggattgctcgttatccaattaatctgcgttatccgcaaagctggcgcgatagcccgcaggcactgcgccagttgccgatcctcacgccgatgaagcagcaaatcactctggcggacgtggccgacgttaaagtctctaccggaccgtcgatgctgaaaaccgagaatgcgcgcccgacgagctggatttatatcgatgcccgcgatcgtgacatggtgtcggtggttcacgatctgcaaaaagcgatagctgaaaaagtgcagttaaaaccgggcaccagcgtggcattctccgggcagttcgagctactggagcgcgccaaccataagctgaaactgatggtgccgatgacgctgatgatcatcttcgtgctgttgtatctggcgttccgtcgggtgggcgaagcgttgctgattatcagcagcgtaccgtttgcgctggtgggcggcatctggttgctgtggtggatgggctttcatctttccgtggcgacgggcaccggttttattgcccttgccggggtcgccgccgaatttggcgtggtgatgctgatgtatttacgtcacgccatagaggccgagccgtcgttgaataatccgcaaacattcagcgagcagaagctggatgaggcgttatatcacggcgcggtactgcgcgtgcgcccgaaagcgatgacggtggcggtgattatcgctggtctgctgccgattctgtggggaacaggagcagggtcagaggtgatgagccggattgccgcgccgatgattggcggcatgatcaccgcgcctttgctgtcgctgtttattatcccggcggcgtataagctgatgtggctgcaccgacatcgggtacggaaataaaagcaggataccccgtttaaccgtgtggattgtgtcttgcgacgatgggcactaaatgttaaaaggtgcccctcaacaaaaaagacacacaggggaaaggcgtgaaaaacgcgtcaaccgtatcggaagatactgcgtcgaatcaagagccgacgcttcatcgcggattacataaccgtcatattcaactgattgcgctgggtggcgcaattggtactggtctgtttcttggcattggcccggcgattcagatggcgggtccggctgtattgctgggctacggcgtcgccgggatcatcgctttcctgattatgcgccagctcggcgagatggtggtcgaagagccggtatccggttcatttgcccactttgcctataaatactggggaccgtttgcgggcttcctctctggctggaactactgggtaatgttcgtgctggtgggaatggcagagctgaccgctgcgggcatctatatgcagtactggttcccggatgttccaacgtggatttgggctgccgccttctttattatcatcaacgccgttaacctggtgaacgtgcgcttatatggcgaaaccgagttctggtttgcgctgattaaagtgctggcgatcatcggtatgatcggctttggcctgtggctgctgttttctgggcacggcggtgagaaagccagtatcaataacctctggcgctacggcggtttctttgccaccggctggaatggattgattttgtcgctggcggtaattatgttctccttcggcggtctggagctgattgggattactgcggctgaagcgcgcgatccggaaaaaagcatccctaaagcagtgaatcaggtggtgtatcgcatcctgctgttttatatcggttcactggtggttttactggcgctctacccgtgggtggaagtgaaatccaacagtagcccgtttgtgatgattttccataatctcgacagcaacgtggtagcttctgcgctgaacttcgtcattctggtggcatcgctgtcggtgtataacagcggggtttactctaacagccgcatgctgtttggcctttctgtgcagggtaatgcgccaaagtttttgactcgcgtcagccgtcgcggcgtgccgattaactcgctgatgctttccggagcgatcacttcgctggtggtgttaatcaactatctgctgccgcaaaaagcgtttggtctgctgatggcgctggtggtagcaacgctgctgttgaactggattatgatctgcctggcgcatctgcgttttcgtgcagcgatgcgtcgtcaggggcgtgaaacacagtttaaggcgctgctctatccgttcggcaactatctttgcatcgccttcctcggcatgattttgctgctgatgtgcacgatggatgatatgcgcttgtcagcgattctgctgccggtgtggattgtgttcctgtttgtggcgtttaaaacattgcgtaggaaagtgaattaagctgatgtgaggctgatttgcccgatgcgcaagcttatcgggcctacaatttgtaacgattctgtaggtcggataaggcgttcacgccgcatccgacaaaatgatgtcaaccatccgaaaccgctctcatccattcgatgagagcggtttttttaattactgcttaaatgcacccgccagagagcgaatatcattgccggttggcgactgatgaagtcgcagaccaaactcttcgacaatcgcaaatatgtgatcgaatatatcagcctgaatgctttcatattccagccacaccacggtgttggtaaacgcatagatctcaagcggtaaaccgttatcaccaggagccagttggcgtaccattaaggtcatatctttgcgaatccgcggatgattccgcagatattcgttcagataggcacgaaaggttccaatattggtcattcggcgcaggtttaataccgactccgtagaaccttgctggcgattccactcattaatttcctgatggcggctggttaaataaggctttaacaaatgcgctttattcagacgttgcatttcgtcttcatcaagaaaacgaatactggtgacatcaatactgatactgcgcttaatacgtcgcccgccagatgctgacatcccgctccagtttttaaaggagtcagaaaccagagaccaggtgggaatagtggtaatggtattgtcccagttacgtactttgacggtggttaacccaatatcgatcaccgcgccatccgcgccgtatttcggcatctccagccagtcgcccagtttcagcatatcgttcgcggaaagctgaatacctgccaccagaccaagaatcggatctttaaataccaacatcagcacggcagccattgcaccaagaccgctgatcagaatcgctggcgactgaccaatcagcagcgagatcatcaaaatgccgaccagaatcgcgccgatcagtttaatcccctgaaaaatccctttcagcggtaactgagatgccgccgggaatttctgcgccagattcaaaatcacatccagcaacgagaagactgaaagcagcgcatacatcatgatccacaactgcgcgcaggtagtcagaatatctgccgcttcggtgcctttttgtagccagaataccgcctgaatattgacgataatcccctgcaaggtaaaagctaaacggtggaagagtttattctgggtaatgatttgcaaccaaagccgtgaactggcgatggcgcgtttttcgaaggtccgcagtaccacccagtgcaaaaaaatatgcaccacgacggcggtcagaaaaataataccgaaaatcatcaccatcgaggtggtgtgatcaatctcaatacccgctaaatcttcaacctgggatattaaatcctgcataacgtctcctttatacaacagcagcctatgatgacggctgaaacagggttatgcaaatcaggagaatctgaggggaaatagccgggcagatgcccggcaagggagaattacacttcggttaaggtaatgttctgcggcagacgagatttcggcagcgtagcgttaaaatcttcaacgctgtgatgacccaccggaacaaccaccagactggtgtagcctttctctttcagaccaaattcttcatcgaggatggcggcgtcaaaaccttcgatgggcaccgcgtccagacccagcgccgccacgcccagcaggaagttaccgacgttgagataaacctgttttgccatccactctgcatcatcatgcagatctttacggtgcatatcggcgaagaacttgcgacctttatcgttcgcggctttcgcttccggcgtggcaaagcggccatcggcatcttcctggtcaacaaccagcttcagccaggcatcgtccatcgcggtttttgcacagaacaccacgacgtgcgaggcatcaagcattttacgctcgttgaacacgtaattatcggcagcggatttggcaacacgcgctttaccttcttccgtgctggcaacaataaaatgccacggctgggagttggtgctggatgggctgtattgcagtagagttttgatctgctcggcctgttccggggtaagttttttgctggcatcaaatgccttagtggaatgacgctttaaggcgacagaaatgatatccataaagactccatgtgaaagtaattttgcgtgccagcagattacaaggatcgagatgaaatggtaagcgagaaaaatgcgctattgatttacggttgagtcaggacgcagtcgtttttgatcgcgtttagccagaccatcaaccaccagattccacgaatcgttgatcagatcgcgaagtaacgcttcggagatttcctcgccgggatacactgaaatccagtgctttttattcatgtgatacccaggcttgatgcttgggtatatttgctgatttagcagggatttttgtggatcggacttcagattgataaaggggacgccgcgcagctccgacgacagcataaaaatcttgccgccaattttaaaaacatcgaactccgggccaaaaggccagcaaagctcgacaaagggtaactcaagagccaggcgtttcgccgtttcgtgcagtgattgcttatccataaatgttcctttaggcgaaggagaataagcaaagtatgccgcgaagttcggcgataatcgacgtttaatccgccagcgagaaccagcgtcgccagataaagcgtagaacaaaatactcaatagcgcccagcactaaaaaccacagacaaaacaataaagtgtaaagctggctaagatccatcagatggaacgtggtcaccagtttttgtgccagcgttagccccagtgcgggggcgggcagcagcaggcaagagaggaaagccatcagcaaaatgcctgctgcggtggtcaaggtttctaaagggtgtttcataacattgttaaatgtaagttaaaacaccattgtcagggatattcttctgtaaggcaattcccgacttattctccggcccagatctcacaatgctttttcaccagcccaattagcgagccaccatcggcgacgaaatcacgcattagctgcgcttcattcagaccactgacgacctgacggtgcagtgcttcaattgcgctcgatgcgccaattttatgtgcagaaggggtgattttttccagtaaacgcaaggtggcttccgttagtgaccgacgatcgccagtatgcggatcggtaatgacgccttccagcccatagcgacaggcctggaaacggttgaatttatacagcaggtaatctttctcctgatgtttaaacgggcgttccgtcagtaaccagtgggcggtggcctgaattaatcccgccatatttaccgcgtggctaagggttaacggggtatccatcacccgaacttccaccgtaccaaaatgggggctggggcgaatatcccagtgcagatctttaatgctgtcgatcatcgtggtgtaactcaggcagcgaaacagggcttcaaattgttgccagttactgacccacggcatcgggccattatcaggaaaggcggaaaaaatattcggtcgtgaggaggcaaaacgcgtatccgttccttgcatatatggcgacgcggcggaaagggcgataaagtgcggcacaaaccgtgacaagccgtgcagcaaataaatggcgtcatcgccactggcgcagccaacatggacatgctgaccaaaaacggtcgcctgctggatgagatagccaaagttttgcagcgttcgttgatagcgttcgttatcgcacacctcctgacgctgccatttctgaaacggatgcgtgccaccgccgcaaatttccagatgatgatctgcggctgcctgcaatacgactttctgcatcgctgaaaattgcccggcagcctggttgatatcacggcaaacatccgtcgccagctccagcatactttcggtgatatcgtgctttacctctccggccgtgatcttatttttaaccgcgtcaatcagcattgaagagtcctggcttaagtcatagcccggcggattaaccacctgcatttccagttcaataccgagggtaaaaggttcagaaacatgaaaatcgggtaatggcataggtttctcttatgttggcgttttctattcagtatagaagtcggagcggctgggcgagatgcggaagttctggaatgtttcttttttgggtatggtgaactgattgctactgaagcaatttggctacttttgcaatgtgccaagttatggcagagctggctggctgcgaagaattttgacgattgcggcatgcagaaaaatacgggttcagcttcagttgatcaaatgaggagagagaagtccgaaacaggacttactgtataaataaacagctattttgctgaagaagggtaagataacggcgggtgcctgaagctttccggtttcaggtttactctgaggtctggaaggatgaagccccaggacgatatttctatcaaccctggggctacctacccaaacctgaacaatttggatggtagtcccttcttcgcatggaggcaatataaacatgctgacaaaatatgcccttgtggcagtcatagtgctgtgtttaacggtgctgggatttacgcttctggtcggagactcgctgtgtgagtttaccgtaaaggaacgtaatattgagtttaaggctgttctcgcttacgaaccgaagaagtagccgttgtgcggggagcaatccccgcatatccggttgtcaggtcagggtggtaaggcacctgctttacactttcgcccgcggtcagtgatggctgcgggcgaatcgtaccagatgttgtcaattaatcgtgttggcacagcgttatgactattttttcttttatctgccagtgcacagcaaacatctcattctcacgatgaattatgacctgttgtttattccggctaattatctgatagtccagaaaatctgcatcagtttggatttcacttgccttaaatgcgctctctttggcggaaaatgccagtgtcagcgccagaggaaaggctaaaccgcagtctgcaagtcgcttgtgttccgctggtgtaataatgttgtctgtcaattctcttgcggtttgtgcagagaaaatctcttcaatatcaatgccaatcggttgacgggaaaccacggctaatgccgtagtcccacagtgactaatgctgccgtatacccccgcaggccacacaggttggcgtagctcgccgattgcaggcacacatttatagccatattcccgcagcgcataaattgcagcgatccgcccggctaaatgctctgttttacgtttacgtccagcgtgttgaagttgtgcgtagtgcggcagccagagtaaatcctgctcgcgaaaactcgccggatcaaactcaacaaaatgcagcgtatgtcctgcaaaggggagggaggtatgcgtagttttcatgtcaaccatattagagaatgatgacaaacgcaaaactgcctgatgcgctacgcttatcaggcctacgtggtcctgcaatatattgaattggcaagatttttgtaggccggataaggcgttcacgccgcatccggcatgaactacgcgcactttgtcaacaatctgacgttagcttcagaagtgagtattaatgctcatataccacgtacgtcccggctcgttataggtatacgcaccggcaccggcgatatagttggcccctgccagatcgcccgtggtctgggcattacccgcacgccacaaacgtttgtcgaacaggttgtccacgccgccggtcagactgacattcttcgtcacatcccaggtcgcgctcaggccaacaatgctgtacggactgatttctttggtttccggtccaaccgctggctgacctttatagttgtacttcttcggctgctgtttgccgtaccaggtgaaggtcgtttgcatcgacaaatcttcccgtgcctgccagctcagcgttgagttcaacgtatactccgggatgatcgacaaacggtcgcccgtggttttgttttcactcttcagcatataagtgatgttattggtccacatcaccgtttcgctaaccggtacgtttaacgatccttccagaccttcaaccaccgctttcggtacgttatcccactgatagagatcggtgccgactgcgttttgccctacagccacatagcccgcttcaatcttattgcgataatcgttacggaaccaggtcacgcccgccagccaaccgtcgcgtttgaactccagaccaatctccttgttgatgctggtttctgctttcaggtcatcattaccttgcagatagcagccgcccgcgctggcatagcagccctgacctttactgtagagaatgtagtttgggttagtctggtacaggctcggcgctttataggcgcgggcgatgcccattttcagcgtgaagtcatcgcctaaaccttgcgatatgttcagcgccgggctccagttattgccgacaatactgtgatgatcgaaacgcagccccggcgttacgatggtgctgtcagtcagctccatattgttttcggcaaacagcgagaaaatttctgcttttgaatacgggctacggtcggtggcactcacaccatcaatagcaccgccggtattcgtcccggtcagcgcctgggtgttggaacttaagtccttcatccgttgctgattccactctgtacccagcgtcagcgtttggtttacgaggaaatcaatcggcaggttaacttcgctgtgcagcatcacgtcatcaagatcgatatctacaaaatcctgtgccgctttttcgttaaatttcccttcggtaccgcccgccagaccttccggaatacgcgagttacgggtgtgttcgtactgcacccagttgctggtggtcacgccgttatcccagccaccgttccaggtcagcgagtagttctggcgatacaggcggttggtttcatcgccatatttcgatcgagtgtaagcgtcagagttggtgttctgcgtatcacccgcatacaggttaccctggcggctgtagcccgcttccagttcgagtgactgcagaggcgcgaagtcccagcgcaccacgccattaatatctttgttgatcaccccttcgcgcccggctggtaacgtcgtggcatacgttccggcacgcgcggactgatggccctggttgatatcccacgcgtcagcctgggttttgtcgaggttgccatacaagcggaagctgaattcgtcgcccagcggaccggtcaggctgaagttggtgcgtttggtggcaccttcctctttatgttctggcgcattgaaataagcatcccaggagccgtgccactcaccgctgccttttttggtaatgatgttaaccacgccgcccgccgcgccgttgccataacgcgcagctgccggaccacgcagaacttcaatacgttcaatcatttcaggcggcacccaggaggtatcaccacgggtatcgcgctcgccacgccagccctgacgcacagagttacggctgcttaccggcttgccgtcaatcaaaatcagcgtgttttccggacccatgccgcgaatatcaatctggcggttattaccacgctgaccactggtggagttaccggtcaggttaacgccaggcatggtacgaatgatctccgatacatcgcgggcaaccgggtttttgcggatttcatctgcggtaatggtcgaaacgccaggcgcctgcaagttctgctcggcggcggtaacgacaatggtatcgtcatgtgaaacaggagtatcggtcggctcttgtgcctgtgctaccccataaatccccagattgaccaacaaggccagggaatgaatcttcttgttcattgttttattcctgcatttttgccacgaattgcaactgtcgggcatggtcgccatcaacacgacgcatcccgctaccgcgaaaacctttgatcctgaaagacacgcagtgcagctgattaattaatgtccgcgcttcccacggcgcgccattacgctattgcaaatgcaaatagttatcaataatattatcaatatatttctgcaatcaataaaaaattgcacagtaaacatggggttatggtgtgacggcgttaaaagtaggaagtgagagctggtggcagtcgaaacatggcccggaatggcaacgtctgaatgacgaaatgtttgaggtcactttctggtggcgtgatccccagggttctgaagaatactcgacgataaagcgcgtatgggtctatatcactggcgtgaccgatcaccatcagaacagccagccccggtcgatgcagcgaattgcaggaaccgatgtttggcagtggacgacacaactcaatgccaactggcgcggcagctactgctttattcctactgaacgcgatgacattttttctgcaccatcccccgatcgcctcgaattacgcgaaggctggcgaaaactattaccccaggcgatagccgatccgctgaatccacaaagctggaaaggcgggcgagggcacgctgtttctgcactcgaaatgccgcaagcgcctctgcaaccgggatgggattgtccgcaagcgccagaaacgcctgccaaagaaattatctggaaaagtgaacggttgaaaaattcacgccgtgtatggatttttaccaccggcgatgcaacagcagaagaacgcccgctggcagttttgcttgatggcgaattttgggcgcagagtatgcccgtctggcctgcgctgacttcgctgacccatcgtcggcaacttccgcccgccgtgtatgtgttgatcgacgctatcgacaccacgcaccgcgcccacgaactgccgtgtaatgcggatttctggctggcagtacagcaagagttattaccccaggtgaaagctattgccccttttagcgatcgcgccgatcgcaccgtggtcgccggacagagttttggtgggctttccgcgctgtatgccggactgcactggcctgaacgctttggctgtgtattaagccagtcaggttcgtactggtggccgcatcggggcgggcaccaagagggcatgttacttgaacagctaaatactggtgaagttagcgccgaaggtctgcgcattgtgctggaagcgggtgttcgcgagccgatgatcatgcaggccaatcaggcgctgtatgcgcaattacaccccctaaaagaatccattttctggcgtcaggttgacggcggacatgatgcgctttgttggcgcggtggcttgatgcaggggctaatcgacctctggcaaccacttttccatgacaggagttgaatatggcattcagtaatcccttcgatgatccacagggagcgttttacattttgcgcaatgcgcaggggcaattcagtctgtggccgcaacaatgcgccttaccggcaggctgggacgttgtgtgtcagccgcagtcacaggcgtcctgccagcagtggctggaagcccactggcgtactctgacaccggcgaatttcacccagttgcaggaggcacaatgagccagcatttacctttggtcgccgcacagcccggcatctggatggcagaaaaactgtcggatttaccctccgcctggagcgtggcgcattacgttgagttaaccggagaggttgatgcgccactactggcccgcgcggtggttgccggactagcgcaagcagatacgttgcggatgcgttttacggaagataacggcgaagtctggcagtgggtcgatgatgcgcagacgttcgaactgccagaaattatcgacctgcgaaccaacattgatccgcacggtactgcgcgggcattaatgcaggcggatttgcaacaagatctgcgcgtcgatagtggtaaaccactggtctttcatcaactgatacaggtggcggataaccgctggtactggtatcagcgttatcaccatttgctggtcgatggcttcagtttcccggccattacacgccagatcgccaacatttactgcgcattgctgcgtggcgaaccaacgcctgcttcgccgtttacgcctttcgctgatgtagtggaagagtatcagcagtaccgcgaaagtgaagcctggcagcgtgatgcggcattctgggcggaacagcgtcgtcaactaccaccgcccgcgtcactttctccggcacctttaccggggcgcagcgcttcggcagatattttgcgcctgaaactggaatttaccaacggggaattccgccagctggctacgcaactttcaggtgtgcagcgtaccgatttagcacttgcgttggcagccttgtggctggggcgattgtgcaaccgcatggactacgctgccggatttatctttatgcgtcgactgggctcggcggcgctgacggctaccggacccgtgctcaacgttttgccattgggtattcacattgcggcgcaagaaacgctgccgcaactggcaacccgactggcagctcaactgaaaaaaatgcgtcgccatcaacgttacgatgccgaacaaattgtccgtgacagcgggcgagcggcaggagaggaaccgctgttcggtccggtactcaatatcaaggtatttgattaccaactggatattcctggtgttcaggcgcaaacccataccctggcaaccggtccggttaatgaccttgaactggccctgttcccggatgaacacggtgatttgagtattgaaatcctcgccaataaacagcgttacgatgagccaacgttaattcaacacgctgaacgcctgaaaatgctgattgcgcagttcgctgcgaatccgtcgctgttgtgcggcgatgtcgatattatgctgccaggtgagtatgcgcagctggcgcagatcaacgccactcaggttgagattccagaaaccacgctgagcgcgctggtggcagaacaagcggcaaaaacaccggatgctccggcgctggcagatgcgcgttaccagttcagctatcgggaaatgcgcgagcaggtggtggcgctggcgaatctgctgcgtgagcgcggcgttaaaccgggcgacagcgtggcggtggctctaccgcgctcggtctttttgaccctggcgctacatgcgatagttgaagctggtgcggcctggttaccgttggataccggctatccggacgatcgcctgaaaatgatgctggaagatgcgcgtccgtcgctgttaatcaccaccgacgatcaactgccgcgctttagcgatatccccaatttaaccagcctttgctataacgccccgcttacaccgcagggcagtgcgccgctgcagctttcacaaccgcaccacacggcttatatcatcttcacctcaggttccaccggcagaccaaaaggggtaatggtcggtcagcaggctatcgttaaccgcctgctatggatgcaaaaccattacccgcttacaggcgaagatgttgttgcccaaaaaacgccgtgcagttttgatgtctcggtgtgggagtttttctggccgtttattgccggggcgaaactggtgatggctgaaccggaagcgcaccgcgacccgctcgctatgcagcatttttttgctgattatggcgtaacgaccacgcactttgtgccgtcgatgctggcggcatttgttgcatcgctgacgccgcaaaccgctcgccagagttgcgcgacgttgaaacaggttttctgtagtggtgaagccttaccggctgatttatgccgcgaatggcaacagttaaccggcgcgccgttgcataatctatatggcccgacggaagcggcggtagatgtcagttggtatccggcttttggcgaggaactggcagaggtgcgcggcagcagtgtgccgatcggttatccggtgtggaatacgggcctgcgcattctcgatgcgatgatgcatccggtgccgccgggtgtggcgggagatctctatctcaccggtattcaactggcgcaggggtatcttggacgacccgatctgaccgccagccgctttattgccgatccttttgccccaggtgaacggatgtaccgtaccggcgatgtggcccgctggctggataacggcgcggtggagtacctcgggcgcagtgacgatcagctaaaaattcgcgggcagcgtatcgaactgggcgaaattgatcgcgtgatgcaggcgctgccggatgtcgaacaagccgttacccacgcctgtgtgattaaccaggcggcagccactggtggtgatgcgcgtcagttggtgggctatctggtgtcgcaatcaggtctgccgttggataccagcgcattacaggcgcagcttcgagaaacattgccaccacatatggtaccggtggttctgctgcaacttccacagttaccacttagcgccaacggcaagctggatcgcaaagccttaccgttgcctgaactgaaggcacaaacgccggggcgtgtgccgaaagcgggcagtgaaacgattatcgccgcggcattctcgtcgttgctgggttgtgacgtgcaggatgccgatgctgatttctttgcgcttggcggtcattcgctactggcaatgaaactggcagcgcagttaagtcgacagtttgctcgtcaggtgacgccggggcaggtgatggtcgcgtcaactgtcgccaaactggcaacgattattgatggtgaagaagacagcacccagcgcatgggattcgaaaccattctgccgttgcgtgaaggtaatggcccgacgctgttttgtttccatccggcatccggttttgcctggcagttcagcgtgctctcgcgttatctcgatccacaatggtcgattatcggcattcagtcgccgcgccctcatggccccatgcagacggcggcaaacctggatgaagtctgcgaagcgcatctggcaaccttacttgaacaacaaccgcacggcccatattacctgctgggttattcacttggcggtacgctggcgcagggcattgcggcgcgactgcgtgcccgtggcgaacaggtggcatttcttggcttgctggatacctggccgccagaaacgcaaaactggcaggaaaaagaagccaatggtctggatccggaagtgctggcggagattaaccgcgagcgcgaagccttcctggcggcacagcagggaagtacctcaacggagttgtttaccaccattgaaggcaactacgctgatgctgtgcgcctgctgacgacagctcatagcgtaccgtttgatggtaaagcgacgctatttgttgccgaacgcacgcttcaggaaggtatgactcctgaacaggcctgggcaccgtggattgctgagctggatatctatcgtcaggattgtgcgcatgtggatattatttccccggagtattttaaagaaataggaccactaataaatacacaaattaataactaaccgtacgttagtaaagaacttgccataacctcatgtaaaaccataatccgactaaatgattatggtttttttattcttaaaatttatttatttttctgagagcagcgtcattgctggggttgctaagtttgttattcattttgagaataataatagtgaaagagtgctttcggataaatctcagttcctgttagaatgctatgtacatcgttgtgctttacggactaaaacctcaggtttcactacatgtcatcactgaatattaaacagggaagtgaagctcattttcccgagtatcctctggcgtcgcccagtaataatgaaattgatttacttaatctaatcgaggttttatggcgggcaaaaaaaacggtcatggcggtcgtttttgcgtttgcctgcgcaggcttgctgatctctttcatcctgccgcaaaaatggactagcgcggcggttgtcacgcctccagaacctgttcagtggcaagagctggagaaaacattcactaagcttcgtgtgctggatctggatatcaaaattgatcgtacagaagcatttaacctgtttatcaagaaatttcagtctgttagcttgcttgaggagtacctgcgttcatcaccttatgtgatggatcaattaaaagaagcgaaaatcgacccactggatctgcatcgcgccattgttgcattgagcgaaaaaatgaaagcggttgatgacaatgccagtaagaaaaaagatgagtctgcattgtatacttcctggacgctaagtttcaccgcacccaccagtgaagaggcacagaaagtgttggccgggtatatcgattatatctctgcgttggtggtgaaagagtcgatagaaaacgtccgtaataaactggagatcaaaacccagtttgaaaaagaaaaactggctcaggatcgcattaaaacgaaaaatcaacttgatgcaaacattcagcgcctcaattattcacttgacattgccaacgcggcaggaattaaaaagcccgtatacagtaatggtcaggccgttaaagatgaccccgatttctctatttctctcggtgcagacggtattgaacgcaaactggaaattgaaaaagcagtcactgacgttgcggaattgaacggtgaattacgtaatcgtcagtatctagtcgagcaattaacaaaaacaaatatcaacgatgtgaattttacaccgtttaaatatcagttgcgtccgtcattacccgtaaaaaaagacggtcagggtaaggcgattattgtgatcctttctgcgttggtcggcgggatggtggcttgtggtggtgtgttgttgcgtcatgcgatggcatccagaaaacaggatgccatgatggcagaccacttagtttaaatctttgcggttgaaggtgccgttcgtccgagcggcaccacgagcggcgttccggcaaccggatcgtcaataatcatgcagcgcagaccataaatgcgctcgatcagttcagcagtgacaatctccttcggtgctccctgagcaacaattttcccttcccgcaatgcaatcaaatggctggcgtaacgacaggcctgattaagatcgtgcagcaccgccgccagggtatagcctttctcgcggttcagttcgcttaacagttccagcaaatcaatctgatgactgatatccagccaggtcgtgggttcatcgagcagcataattgccgtttcctgggccagcaccatcgcgatccacgctcgctggcgttgtccgccagaaagggtgtccacgctttgatccgccagatgagttattcccgtggcctgcatcgcttttgttaccgcgtcttcatcttctttgcgccagcgggtaaacagcggttgatgcgggtaacgcccacgcgccaccagctcctgcacggtgatatcgcccggtgtggtagcattttgcgccaacagaccaatccggcgtgcaacctctttactggcgtaatgttgaatgtgctcgccatccagccagacatgcccgtgagcaggcgtcatcaggcggcttaaggtacgcagtaacgtggatttaccgcagccatttggcccgataattgccgtgaagtgaccatcaggtatttctacagtcagattttccgcaacggtatatttgccatatccgagggttaactgttcgccgcgcaaacgggctactgattcggtcattttttgcgagactcctgaattaacaagacgataaggtaaataccgccgaggctgacggtaacgacgccaaccggaagttgatacggcataaacagttgttgggcgcagagatcggccaccagcagtaacaacgccccgcacagcgccgcctgggtcagcccccagcgagcggtgccactgatgcggcgggcaatgtgtggcgcgactaaagcaataaaggaaattggccccgccagggcagtggcagctgcggtaagcactacggcgaccagcatcattaacagtcgcgaacgttcgacgctgacgcccagcgcacatgcggtatcatcgcccatttccagcaagcgcattcgccgcaccagcaaggcggcggcaattaacattaatataatgatgggtgcggaaggcgaggtttttgcccacgtcaggccattgagcgatccggcattccacaaacccgctgttagcgccgtttctaaagacgctttcagcaacagccaggtattaaaggccaccagcatggcgcgaacaccgataccgataataatcaaccgaaaggtgtcgataccgttacgccaggcgagcagccagaccaacagcgaagtgacaatgccgcccaccattgctgccagcgcgatagccgtcaggtcctgaccaaacagcaccatcgccaccagcacgccgctccacgccccggtgttaaagcccattacgtcagggctgccgagcgggttacgcatcagcgactgaaaaatcgcgccgctgacgcccagcgccgcgccaatcaacagcgccatcagcacgcgtggtaaacgccattcggtgaccaccatcgtcatactgcgcggcgtgtcgcccatcaacgcggcgaatacctgcgaagtttccagcgtgacggcaccgctacgtaatccccacacgcctgccatcacacaagctattagcaacagcagacaggtgataattaatcggcgagagacgtaaatcatgcgccacctcgcgttttacgtcgtacgaggaagatcagcactggtgcgccaataaaggcactgactacagaaacgcgcagttcgccgggaacaatcacccgcccaatgatatcggcaaacagcagcagggcaggggtagcgagtagcgtgacgggcagcgaccagcgatgatcggcacctaccagccagcgcgccatgtgcggcatcatcaggccaataaaggcaatcgggccaactaccgccgtcgcactaccacaaagcacggtaattgccagcagaccaatcaactgtgtgcgcgctacgcgactgcccagtgccgtcgcggtgtcactgccaaggcttaaactgttcagcgcgcggctcagtaatagcgcagttgctccagcggtaagcaccgggatcagcaccacttttaaggtatgtagattgcgaatatccagcgaaccggcttgccagaaacgcagttgatcgtagacgtcaggattaagcagggcgatgccgctggtcagcccttccagcaccgccgccagcgccacgcccgccagggttaaacgcaccggacttaactgcccgccgccctggctgccggtaaaggcaacaatcaacgaggccaccagcgccccggcgaaggccatcgccagttgttcctgtgcggaagagtaaccaaacagcgccgcacccagcacaatggcaaaactggcaccggcgttcacgccaagcaaaccaggatcggcaagtgggtttcgggtgagggtttgcattaacgccccggcaaggccaagcgcaccgcctgccagtaaaccggcaagggtgcgcggcagtcgtgcgtcgagcacgatggtgcagtcggcgctctggcaggtgccggagaaggcctccagcactacggaagcggggagtgattttgccccaatgagcaggcttaatgccgtcgcgataatcagtaataacagcaatccgggcacggcaatggcgcgtgtcacggcaacagaaccagacatacgaacttccatgataatgaaattaattatcgttatcgatcttatttggatatgttagcatgtgcagcctaagaataggtatttaaaatatttgatggcaaggcattgtaatgaataaacaatcctggctgcttaacctcagcctgttgaaaacgcacccggcgtttcgcgcagtattcctcgctcgttttatctcaattgtttctctgggtttgctcggcgtcgcggtgccggtgcagatccagatgatgacgcattccacctggcaggtggggctttcggtgacgctgaccggcggcgcgatgtttgttggcctgatggtcggcggtgtgctggcggatcgctatgagcgtaaaaaagtgattttgctggcgcgcggcacctgtggcattggcttcattggactgtgcctgaacgcgctgctgccggagccgtcattgctggcaatctatttacttggtttatgggatggttttttcgcatcacttggcgttacggcgctactggcggcgacacctgcactggtagggcgtgaaaacttaatgcaggccggggcgatcaccatgttgaccgtgcgcctggggtcggtgatttcgcccatgattggcggtttactgctggcgactggcggtgtggcctggaactacgggctggcggcggcgggcacgtttattaccttgctaccgttgttaagccttccggcgttaccaccaccaccgcagccgcgtgagcatccgttgaaatcattactggcaggatttcgttttctactcgccagcccgctggtgggagggattgcgttgctggggggtttattgacgatggcgagcgcggtgcgggtactgtatccggcgctggctgacaactggcagatgtcggcggcgcaaattggctttctctatgcggcaatcccgctcggtgcggctattggcgcgttaaccagtggaaaactggcgcatagcgtacggccaggtctgttgatgttgctctccacattgggggcgttcctcgccattggtctgtttggcctgatgccgatgtggattttaggcgtggtttgtctggcactgttcggctggctgagtgcggttagttcgttgctgcaatatacaatgctgcaaacgcaaaccccggaagcgatgttagggcggattaacggtttgtggacggcgcaaaacgtgacgggcgatgccataggcgcggcgctgctgggcggtttgggagcgatgatgacaccggttgcttccgcaagcgcgagcggttttggtttgttgattatcggcgtgttgttgttgctggtgctggtggagttgcgacgttttcgccagacgccgccgcaggtgacagcgtccgacagttaatgcttaaaacagcgccttaagtctatccagcacttgcatggcgctgtagtaatccagacggaacgtctcggttcccagcgcataaacctgcttgttttgtactgcaggcaggtgcgcgagcagcggattagcataaatagcatcggcgtctttctgatcaccggcgaacaggaatagtgactcgccatttaaccctgcagccagattttctccaccaagctgaatgatgtcatggcgtttgccctggctttggctggcgtttaaccctgcgggcaacttcgccagcgtaaagccgagttgttccagcatctgcccttgtgctgattccggcgtccagagattggcactgtgtgcagcggcggtatagacgatggcagtgaccggctgcggcggtaatttgatttgctctttcgccgccgccagttgcttatcaaactgtgcaatccgctctgccgcttgtttctcatgcccggtaatttcgccaagctgcgttaacagcgactgccagcttttgtcgtcgtaattgatgattaatgttggggcgatggtagaaagctgatcgtacagcgccagcgccgaatcgccgccggttgcgctaattaaaatcagatccggcatttgcgcggcaacggcttctgcactcggttcgccgatatagagccgttgcagtttgcgttctttcgccaccttgctccactggcgtaaaaagccctggtcatccgcgacgcggttatttggcgtggtcgcgccgctggcgatcaccggagcatcaatcgccagcagtgagccggtcagggtgacgctggtggaaactatacgctgcggctggctttccagggtatgagtgccacggctgtcagtaatctgacgcggccagtcggcggcctgaactgcggctattcctgaaagcaaaagtcctgttaatagaagggcgttgcggtagagcggggcgagtctcacaagtcagcttcctgttattaatgaagttaatgcttctcattttcattgtaaccacaaccagatgcaaccccgagttgcagattgcgttacctcaagagttgacatagtgcgcgtttgcttttaggttagcgaccgaaaatataaatgataatcattattaaagcctttatcattttgtggaggatgatatggatacgtcactggctgaggaagtacagcagaccatggcaacacttgcgcccaatcgctttttctttatgtcgccgtaccgcagttttacgacgtcaggatgtttcgcccgcttcgatgaaccggctgtgaacggggattcgcccgacagtcccttccagcaaaaactcgccgcgttgtttgccgatgccaaagcgcagggcatcaaaaatccggtgatggtcggggcgattcccttcgatccacgtcagccttcgtcgctgtatatacctgaatcctggcagtcgttctcccgtcaggaaaaacaagcttccgcacgccgtttcacccgcagccagtcgctgaacgtggtggaacgtcaggccattccggaacaaaccacgtttgaacagatggttgcccgtgctgccgcacttaccgccacgccgcaggtcgacaaagtggtgttgtcacggttgattgatatcactactgacgccgccattgatagtggcgtattgctggaacggttgattgcgcaaaacccggttagttacaacttccatgttccgttggctgatggtggcgttctgctgggggccagcccggaactgctgctacgtaaagacggcgagcgttttagctccattccgttagccggttccgcgcgtcgtcagccggatgaagtgctcgatcgcgaagcgggtaatcgtctgctggcgtcagaaaaagatcgccatgaacatgaactggtgactcaggcgatgaaagaggtactgcgcaaacgcagtagtgagttacacgttacctcctctccacaattgattaccacgccgacgctgtggcatctcgcaactccctttgaaggtaaagcgaattcgcaagaaaacgcactgactttggcttgtctgctgcatccgacccccgcgctgagcggtttcccgcatcaggccgcgactcaggttattgctgaactggagccgttcgaccgcgaactgtttggcggcattgtgggttggtgtgacagcgaaggtaacggtgaatgggtggtgaccatccgctgcgcgaagctgcgggaaaatcaggtgcgtctgtttgccggagcggggattgtgcctgcgtcctcaccgttgggtgagtggcgcgaaacaggcgtcaaactttctaccatgttgaacgtttttggattgcattaaggagcgaggatgagcattccattcacccgctggccggaagagtttgcccgtcgctatcgggaaaaaggctactggcaggatttgccgctgaccgacattctgacccgtcatgccgcaagcgacagcatcgcggtcatcgacggcgagcggcagttgagttaccgggagctgaatcaggcggcggataacctcgcctgtagtttgcgccgtcagggcattaaacctggtgaaaccgcgctggtacaactgggtaacgtcgctgaactttacattacctttttcgcgctgctgaaactgggcgttgcgccggtgctggcgctgttcagccatcagcgtagtgaactgaacgcctatgccagccagattgaaccggcgttactgattgccgatcgccaacatgcgctatttagcggggatgatttcctcaacacatttgttgcagagcattcttcgattcgcgtggtgcagctgctcaacgacagcggtgagcataacttgcaggatgcgattaaccatccggctgaggattttactgccacgccatctcctgctgatgaagtggcctatttccagctttccggcggcaccaccggcactccgaaactgatcccgcgcactcataacgactactactacagcgtgcgtcgtagcgtcgagatttgtcagttcacacaacagacgcgctacctgtgcgcgatcccggcggctcataactacgccatgagttcaccgggatcgttgggggtatttctcgctggcggcactgtcgttctggctgccgaccccagcgccacgttttgcttcccattgattgaaaaacatcaggtgaacgtcaccgcgctggtgccgccagcagtcagcctgtggttgcaggcactggctggaggcgaaagccgggcgcagcttgcctcgctgaaactgttacaggtcggcggcgcccgtctttctgccacccttgcggcgcgtattcccgctgagattggctgtcagttgcagcaggtgtttggcatggcggaagggctggtgaactacacccgtcttgatgatagtgcggagaaaattatccatacccagggttacccaatgtgcccggacgatgaagtatgggttgccgatgccgaaggaaatccactgccgcaaggggaagttggacgcctgatgacgcgcgggccgtacaccttccgtggctattacaaaagcccgcagcacaatgccagcgcctttgatgctaacggtttttactgttccggcgatctgatctctattgatccagagggttacatcactgtgcaggggcgcgagaaagatcagatcaaccgtggcggcgagaagatcgctgccgaagagatcgaaaacctgctgctgcgccatccggcggtgatctacgccgcactggtgagcatggaagatgagctgatgggcgaaaaaagctgtgcttatctggtggtaaaagagccgctgcgcgcggtgcaggtgcgtcgtttcctgcgtgaacagggtattgccgaatttaaattaccggatcgcgtggagtgtgtagattcacttccgctgacggcggtcgggaaagtcgataaaaaacaattacgtcagtggctggcgtcacgcacatcagcctgaaggagagaacacgatggctattccaaaattacaggcttacgcactgccggagtctcacgatattccgcagaataaagtcgactgggcctttgaaccgcaacgtgccgcgttgttaatccatgatatgcaggactattttgtcagcttctggggtgagaactgcccgatgatggagcaggtgatcgcgaatattgcggcactacgcgactactgcaaacagcacaatatcccggtttattacaccgcccagccgaaagagcagagcgatgaagatcgggcgctgttgaatgatatgtgggggcctggcctgacccgttcgccggaacagcaaaaggtggtggatcgcctgacgccagatgccgacgacacggtgctggtgaaatggcgctacagcgcgtttcatcgttccccgctggagcaaatgctcaaagagagtggacgtaaccagctgattattaccggggtatatgcccacattggctgtatgaccaccgcaacggacgcatttatgcgcgatattaaaccgtttatggtggcggatgcgctggccgatttcagccgtgacgagcatttgatgtcgctgaaatatgtggccggacgttctggtcgggtggtgatgaccgaagaattgctgccagcacctatccccgccagcaaagcggagctgcgtgaggtgatcctgccgttgctggacgagtccgatgaacccttcgatgacgacaacctgatcgactacggtctggattcggtgcgcatgatggcgctggcggcgcgctggcgcaaagtgcatggtgatatcgactttgtcatgctggcgaaaaacccgaccatcgacgcctggtggaagctactctcccgcgaggtgaaataatggatttcagcggtaaaaatgtctgggtaactggcgcggggaaaggtatcggctatgccacggcgatggcatttgttgaggcgggggcgaaagttacaggttttgatcaagcgtttactcaggagcaatatccttttgcgaccgaagtaatggatgttgccgatgctgcgcaggtggcgcaggtatgtcagcgactgttagctgaaacggagcgactggacgtgctggtcaatgcggcgggaattttgcgcatgggtgcgaccgatcagctcagtaaagaggactggcagcagacttttgcggtcaacgtcggcggtgcgtttaacctgtttcagcagaccatgaaccagtttcgccatcagcggggcggggcgattgttactgttgcgtccgacgccgcacacacgccgcgcattggcatgagtgcttatggcgcatcgaaagcggcgctgaaaagcctggcgttgagcgtcgggctggaactggcgggtagcggcgtgcgctgtaatgtggtttcgccgggctccaccgacactgatatgcaacgcacgctgtgggtgagcgatgacgccgaagagcagcgtattcgcggctttggcgagcagtttaaactcggcattccgctagggaaaatcgcccgtccgcaggagatcgccaacacgattttgttcctcgcctctgacctcgccagccatattaccctacaggatattgtggtcgatggcggctcaacgctgggggcataagcatgatctggaaacgccatttaacgctcgacgagctgaacgccaccagcgataacacaatggtggcgcatctgggaattgtgtatacccgtctgggcgatgatgtactcgaagccgaaatgccggttgatacccgtactcatcagccgtttggcctgctgcatggcggcgcgtcggcggcgctggcggaaacgctgggatcgatggccggatttatgatgacccgcgacggacagtgtgtggtgggcacggaacttaacgccacacatcatcgcccggtgtctgagggaaaggtgcgcggtgtctgccagccgctgcatcttggacgacaaaatcagagctgggaaatcgtcgttttcgatgaacaggggcggcgttgctgcacctgtcggctgggcacagcggttttgggatgaacccgacagaataaaatgagattgcaggaaaattcggttaacggagtgatcgagttaacattgttaagttaaatattggtttcaactccgatttgcatggttgctgtgttgttaaattgtacaaagatgttatagaaacaaaatgtaacatctctatggacacgcacacggataacaactatgaacaaatcagggaaatacctcgtctggacagtgctctctgtaatgggagcatttgctctgggatacattgctttaaatcgtggggaacagatcaacgcgctgtggattgtggtggcgtcggtctgtatctatctgatcgcttaccgtttttatgggctgtatatcgccaaaaatgtgctggcggttgacccgacgcgtatgacgccagcggtgcgccataacgacgggctggactatgtgccgacggacaaaaaagtgctgttcggtcaccattttgcggccattgccggagcaggtccgttggttgggccggtactggcggcgcaaatgggttacctgccagggatgatctggctgctcgcaggggtggttctcgccggtgcggtgcaggatttcatggtgctgtttgtttccacgcgccgtgacggtcgctcgctgggtgagctggtcaaagaagagatggggccaaccgccggggtgatagcgctggtggcctgctttatgatcatggtcattatccttgccgtgctggcgatgatcgtggttaaagccctgactcatagcccgtggggaacgtataccgttgcgttcaccattccgctggcgctgtttatggggatctacctgcgctatttgcgtccggggcgtattggcgaagtgtcggtgattggtctggtgttccttattttcgccattatctctggcggctgggtggcagaaagcccgacgtgggcaccgtactttgactttaccggcgtgcagctgacctggatgctggtgggttacggttttgtggcggcggtgctgccggtgtggttgctgctggctccgcgtgactacctctcaaccttcctgaaaatcgggactatcgtcggtctggcggtgggcattttgattatgcgcccgacgctgaccatgcctgcgctaactaaatttgtcgatggcactggcccggtatggaccggtaacctgttcccgttcctgtttatcaccatcgcctgtggcgcggtgtctggcttccatgcactgatctcttccggcactacaccgaagatgctggcgaacgaagggcaggcgtgctttatcggctacggtgggatgttgatggaatccttcgtggcgattatggcgctggtttccgcctgtatcatcgatccgggtgtgtacttcgccatgaacagcccgatggcggtgctggctccggcagggacggcggatgtggttgcttctgccgcgcaggtggtgagtagctggggctttgcgattaccccggatacgctaaaccagattgccagcgaagtgggtgaacagtcgatcatttcccgtgcgggcggagcgccgaccctggcggtggggatggcctacattctgcacggtgcgctgggcggcatgatggatgtggcgttctggtatcacttcgccattctgtttgaagcactgtttattctgacggcggtggatgcgggtacgcgtgctgcgcgctttatgttgcaggatctgctgggcgtggtgtctccgggcctgaaacggaccgattcactgcctgctaacctgctggcaacggcgctgtgcgtgctggcgtggggctacttcctgcatcagggcgtggtcgatccgctgggcggtattaacactctgtggccgctgtttggtattgccaaccagatgctggcagggatggcgctgatgctctgtgccgtggtgctgttcaaaatgaaacgtcaacgttatgcctgggtggcactggtaccaacggcctggctgctgatttgtaccctgaccgcaggctggcagaaagcgtttagcccggatgcgaaagtcggcttcctggccattgctaataagttccaggcaatgatcgacagcggcaatattccgtcgcagtatactgagtcacagctggcgcaactggtgttcaacaaccgtctggatgccgggttaaccatcttctttatggtggtcgtggtggttctggcactgttctcgattaagacggcactggcggcattgaaagagccgaagccaacggcgaaagaaacgccgtatgagccgatgccggaaaatgtcgaggagatcgtggcgcaggcgaaaggcgcgcactaaagtcagagtgagggggaatgtgctgagcgttccccttactctcagcccgagcgtgttgatagcagttaagccctcttaattcaggagggcatttgtattactggaggtttagatgtttgattcactggcaaaagccggaaaatatttaggtcaggcggcgaaactgatgattggtatgcctgattacgacaactatgtcgaacatatgcgggttaaccatcccgatcaaacgccgatgacctacgaagagtttttccgtgagcggcaggacgcgcgctacggtggaaaaggcggcgcgcgctgctgctaaatatgtacgtcaggctttaaacgattccactttttcgaacgctgcacgcaacgtatctggtgtcagcgtgaccggcaggtaatgaatggattccaccggacgcaaggtgtgggcaatcactttgtcgatctccgcctgattattgatatccacttccagctccgccagcgtagtcggcagatgaaaacgctgatacgctccagttaattgcgccagcacatcatcctgacccagcaaggcgctttgcaccagaattccgtaggcgactttggtgccgtggagaaacttctcggtttgcggcagcacggtcagaccgttatgcacggcatgagctgccgccacacgcgtaaaacgatcgcccagaccaccaaccatcccaccaccagcaataatggcatccaccacatcgcaaaatgattgcgttaactggtgattttgctgatcgctcagcgcctgttcgctactgtttaacaagacgtcgcgaatagcctgcgcattattgatccctagccgcacggttagcggcaacgtttctggttgcggggccagcaccaccgcttcataccatttcgccagcgtgtcaccgatccccgccagcagatattgttgcggcgcgttgaggataatctccggttccaccagcaccataaaattggcgtcgtcgaaaatctcataatgcagcgcttgtccggcatcgttataccagacagagagcggtgtccaggcggcgcaggtagcggcgatcgtcggaacggtaacaaacggcagaccgagacggcgggcgagggctttcgcggtgtcgagtagtgcgccgccgccgacgccaatcaccacgctgcgatcgtcaccggactccgccgccagttgttgcacatcgctttcgctgcaatgaccacgaaacaaaatatgctttacccctggcagttcaaacgcaggcggcagtttggtttgtgccgcagcaatggcgcgttcgccgtagatccacaccgcgcgagaaagttgttcatcagtgaaaaaatcgtgcaggtgattgaaacttccgggatgtgaaaagtagttagccgggccgacgaccacgcggataggattgtgaggcatgttgtgttgtccttattgttttatttagacatctaaacgtcttgattgccaaatactagcatcgtgttatagtgccttcaacacgcaacttcgtcaggtacaataaaaatgacaaataaccctctgattccacaaagcaaacttccacaacttggcaccactattttcacccggatgagcgcgctggcgcagcaacaccaggcgattaacctttcgcaaggctttcctgattttgatggtccgcgctatttacaggagcggctggcgtaccacgttgcccagggggcaaaccaatacgcgcccatgaccggcgtgcaggccttgcgcgaggcgattgctcagaaaacggaacgtctgtatggctatcaaccggatgtcgacagcaatatcaccgtgacggcaggggcgacggaggcgttatacgcggcgataaccgcattggtgcgcaatggcgacgaagtgatttgttttgatcccagctatgacagttacgcccccgccatcgcactttcggggggaatagtgaaacgtattgcactgcaaccgccgcattttcgcgttgactggcaggaatttgccgcattgttaagcgagcgcacccgactggtgatcctcaacaccccgcataaccccagtgcaactgtctggcagcagactgatttcgccgctctgtggcaggcgatcgccgggcacgagatttttgtcattagcgatgaagtctacgagcacatcaatttttcacaacagggccatgccagcgtgctggcgcatccgcaattgcgtgagcgagcggtggcggtgtcatcgtttggcaagacctatcatatgaccggctggaaagtgggttattgcgttgcgcctgcgcccatcagcgccgagatccgcaaagtgcatcagtatctgaccttttcggtgaataccccggcacagttggcgcttgccgatatgctacgtgcagaacctgagcattatcttgcgttaccggacttttatcgccagaagcgcgatattctggtgaatgccttaaatgaaagtcggctggagattttaccgtgcgaaggtacatactttttgctggtggattacagcgccgtatctacgctggatgatgttgagttttgccagtggctgacgcgggagcacggcgtagcggcgattccgctgtcggtgttttgcgccgatcccttcccacataaactgattcgtctctgttttgccaagaaggaatcgacgttgctggcagcagcagaacgcctgcgccagctgtagttatttaaccgtccaggcgcgggaaaattgacggtcggcaaacaactcttgcaggccgttaatttgcttcaggcgcaacacttcgtcgctgtccattcccagctctttgccaattttattatcgtcccatcccaactggctgagttctcggacgatttctgacatggcagtgatttggtgacgtccacgagcgcgattatgacgaatagtcgcggcgatgcgttgattacgcgtaccttccagacaggtcaccggcaaataaccttttaagcgtaattttaacgatgatgagcctttaccaatttcatggcggtgaaaaccatccacgatttccagagcatttttatccgtatgcgtgactacaatgggttgggtaaaaccatctatttcaatggattttttcagcagttttttttcgggtggtgccacgttgtttgggttgtaatcattaggcataagttggctgtttttaacccacagaacgcaatccactggctcttcacgaaaggggctaacctgatggatcgccatgcggatttcattaatcgctttgatgcgatcatcttccggcaagctggcgagaaattgggttaaatcctgcgttaatcgttgttgcatagtatcccccattcctgacgttttccttttatccgttcgttataacgctgatagttcttcgctttcgtaggactaaatgataatgcccggcaccagtaatcgttattgagtaaaactttgcatattcgccgccaggaggggatatctttcgcgccaatgtccccgtgctgggtctgtggcacctcgacaccttttttctgataccaatgcaagtaaatggcaattttgttgcggtaatgctcagcggttttctccggcatgctatcaagcagcaataatgcatactcttgccagtctaaatgctctggtttgaggattttccgatgaccataaaaatgattgtcatgtccggcgtaaatgccgccactttttaccccgctgactcgtgcgcacatagcagcccagcgatccggttcgataacgtgatagagccataatccttgtcgttgctccgggccaaaaggttcgcaaattcgcatatgacgcagagggacgcctgcctgatacattatattatacagtgggttacagagctgttgatggttagcataccaggtccagatatcagccactttccagtcgtagatggggtaaatgtaccagctatgaccgcctggtgcggcagtagtccagggcttatcatcggcaaaacgttgtttatttaaactggcgatggcgacaaaacggttgaaggactcatctgcacggatgccgatcatcatcgccgccggacgtttttgtgaaaaccattcagcaaactcacgcacaaattgttcgaaggtcatgccaggctggtaaaaggagaaaaagtcaggatcggttatcgcatcttgcgggggctgacgcacccattcgacatcaggttcccagcactgccattcgggttggtattgagaaagggaattttgcgtcgtaagcgggagcgcaacccagtaaaactcttcgatgacatcggcgtaaaactcacgtaatgactgaacatagttaatagtgcatgagaactgcgcttcccagtcgataaacaaaacgcagatttttttgcccatttgtcgggcaatttcggctgtcagatgcagcattaatccggaatctttaccacccgaaaaagaaacacagatacggggtagggtattaagtgtccaggtaatacgttcttttgcagcttccagaatattcagtggaagcgggattttataaatagacatctaaaaacgctctctgaacgttacggggtgattcgtgagatgaatccgctaattataggataaacgaagcaagatagagcacattattttatattcacacaatgaattaattgatgcgtaatatattatttgtcagtggtaatgaatcagaagctatcatttaaacgatctatgaatcgggagaagacaaggttgttcaacgaagccttgttataggatatataaagtttaaccgcaggaagaggttgttccagttttatttcttttaacttcaaaaagtcacgatgtaaatcgtacagttcggtgggcacaatgcctaataagtcagtaacagaaatactattaattatagtcatcaaagaagaactgcgaaatgaaactttacggttcataaaacgttcatctatgtccatttgaatttcgtcaatccctgctgatttagatatcaacagggtgaattcttcggcgataatttgttcatagttactggtatcagtaatacgaggatgtttgttgctacatataagggaattgcgaatagtgtgtaacggcatgcagatgacagagcgactaattactggttgcagcgtaattgccaggtcagttttgcgttgaaccaacagttcttcggcattttcagctgaaagcagtatgtcatggcattctatatcgattgaagtatcttgtctaagacagcggattagcatgttgttattagtacaagaaataagctgaggaccgtagataataaaatttttctttagttcagacttattaacgatattgatcgtttgttcaaggcctctgagatttttctcaagatggtgatgcaggtttaaccctgttgtagtcggcgcgatacctttccctgagcgaatgaataacgggtcattaaattgcgcacgtaaacgttgtaacgactgactaacagcagagggcgttatatataatgattctgccgctttactaatgctgagatgttgataaatacattcaaatatgaccagtaaattgaggtcaaatttttttagatcataaagattagccataacatactccgttgtattgtctcttccataaatcattcacttgttcaataatgttgttgtatttatatgtattatgtttttctgcttaactttggattaagattttctaaaatagcatagctgtcaggtgggttacgagcaattcatgcgtttttaggatggttgaaaagcagagagagatttcaaccatcgatgaattatattctatttattccccataatgatattaagtgttttctgatcgggtaatccgacggcttgttgcagggtattttccttactcatgtaatagatagctggtgtgacatttgcccccagatcgtccatgagtttctcgttgtcgcttaacactttcatttgctctgtgcttacgtttgcaggcacgcttagcttaagcttgccaccagaggcttcatattgttgccaggtttttgcgggatctttggaggcaagaattgccgctgctgtcgccgggctttctggcttgataaccccaaccaacaatgttctcaattgcactttgccagaatctacccacggacgagcctgctgccagaactgtttacaatatgggcagaacggatcggcgaagacgtagacaatgaccggcgcgtcttttttaccgtcgaggagccagtgggattgttccatccgttgccacatttcacgtccggcgggtgcgtaaatttctttttcgataagcgtgttactcaggttttcacctttttcgttgtacatgtaaccagagatagcgtgcttaccatctggagtcaggtagatggtgacgcccatatcctgatacttaccgagataacctttcattcctccaggggcatcgaacgttttgatgattgtaataccctgtttttcaatcgcttttactggggcaggaagttcctctgcgaaggcgattgcaggaagcagagccagtaaaagtatcttttttaacattaatttgtccttttcagtcagtgcaaaagtcgagtaaaaggcataacctatcactgtcataggtaagagcttagatcaggtgattgccctttgtttatgagggtgttgtaatccatgtcgttgttgcatttgtaagggcaacacctcagcctgcaggcaggcgctgaagataccaaagggtagttcagattacacggtcacctggaaaaggggccattttactttttatcgccgctggcggtgcaaagttcacaaagttgtcttacgaaggttgtaaggtaaaacttatcgatttgataatggaaacggattagccgaatcggcaaaaattggttaccttacatctcatcgaaaacacggaggaagtatagatgtccttgattaacaccaaaattaaaccttttaaaaaccaggcattcaaaaacggcgaattcatcgaaatcaccgaaaaagataccgaaggccgctggagcgtcttcttcttctacccggctgactttactttcgtatgcccgaccgaactgggtgacgttgctgaccattacgaagaattgcagaaactgggcgtagacgtatacgcagtatctaccgatactcacttcacccacaaagcatggcacagcagctctgaaaccatcgctaaaatcaaatatgcgatgatcggcgacccgactggcgccctgacccgtaacttcgacaacatgcgtgaagatgaaggtctggctgaccgtgcgaccttcgttgttgacccgcagggtatcatccaggcaatcgaagttaccgctgaaggcattggccgtgacgcgtctgacctgctgcgtaaaatcaaagcagcacagtacgtagcttctcacccaggtgaagtttgcccggctaaatggaaagaaggtgaagcaactctggctccgtctctggacctggttggtaaaatctaaatttcctttgtctttcgcgctactaactccggcgcgagatacttcggaaattcacctaattcttcgggtgctgcggcacccgattttcttccccgcaccatgatgcaagctgcatccagctagccgcagaggccgcttgcatgatgatgtttaaagcccaggagataaacatgctcgacacaaatatgaaaactcaactcaaggcttaccttgagaaattgaccaagcctgttgagttaattgccacgctggatgacagcgctaaatcggcagaaatcaaggaactgttggctgaaatcgcagaactgtcagacaaagtcacctttaaagaagataacagcttgccggtgcgtaagccgtctttcctgatcaccaacccaggttccaaccagggaccacgttttgcaggttccccgctgggccacgagttcacctctctggtactggcgttgttgtggaccggtggtcatccgtcgaaagaagcgcagtctctgctggagcagattcgccatattgacggtgattttgaattcgaaacctattactcgctctcttgccacaactgcccggatgtggtgcaggcgctgaacctgatgagcgtactgaacccgcgcatcaagcacactgcaattgacggcggcaccttccagaacgaaattaccgatcgcaacgtgatgggtgttccggcagtgttcgtaaacgggaaagagtttggtcagggccgcatgacgttgactgaaatcgtcgccaaaattgatactggcgcggaaaaacgtgcggcagaagagctgaacaagcgtgatgcttatgacgtattaatcgttggttccggcccggcgggtgcagcggcagcaatttactccgcacgtaaaggcatccgtaccggtctgatgggcgaacgttttggtggtcagatcctcgataccgttgatatcgaaaactacatttctgtaccgaagaccgaaggccagaaactggcaggtgcgctgaaagttcatgttgatgaatacgacgttgatgtgatcgacagccagagcgcgagcaaactgatcccggcagcggttgaaggcggcctgcatcagattgaaacagcttctggcgcggtactgaaagcacgcagcattatcgtggcgactggtgcaaaatggcgcaacatgaacgttcctggcgaagatcagtatcgcaccaaaggcgtgacctactgcccgcactgcgacggcccgctgtttaaaggcaaacgcgtagcggttatcggcggcggtaactccggcgtggaagcggcaattgacctggcgggtatcgttgagcacgtaacgctgctggaatttgcgccagaaatgaaagccgaccaggttctgcaggacaaactacgcagcctgaaaaacgtcgacattattctgaatgcgcaaaccacggaagtgaaaggcgacggtagcaaagtcgtaggtctggaatatcgcgatcgtgtcagcggcaatattcacaacatcgaactggccggtattttcgtccagattggtctgctgccgaacaccaactggctggaaggcgcagtcgaacgtaatcgcatgggcgagattatcattgatgcgaaatgcgaaaccaacgtcaaaggcgtgttcgcagcgggtgactgtacgacggttccgtacaagcagatcatcatcgccactggcgaaggtgccaaagcctctctgagtgcttttgactacctgattcgcaccaaaactgcataagaagaagtaagattcacctgtaattgcttagccgccggggtcaaacctggcggcttttttattgcattaaaaagccctgcagggatggctccgggcagggcgggagacttattctggcaattaacgcacaaccagcaccggcaaattggcgtggcggattacgctcgaggcgttagaacccaacagatgagttgaaattgatgggttacgcgaaccaatcactactacatctgcatcaagttctttcgctaactcgttaacttcatcccgcacactaccaaaacggacatgttgcttaatgcgggaaggatcgatggtgaagtggctgaccatcgtttgcagacgttcttctgcttcatgttgcagatgctcttcaaaacgacgtacatcagcggcaaaacggtgcaggctcaggctggctgaccccggtagtacgtgaagtagatgaataactccgtcatcctgggcgaggaattcagcgtggcgaatcgctttgtcgctcaattccatttcgaaaacatccactggcatgatgattgttttgtacataagcattctctccttgtttttgcatgtatacataacagcacattattggttatgaatctataatttgcgaggctgatttgatctgaatttgctattgagctggaaaataaataaaaaccaggcgctaccagcgttgttcaaggtatagcactgcagcaacaataattgctgctatgaatatataaaatgcagtgataccgagagcttcgctcatatgaggttccgcagatgaataaccagttcagattagaatgctgcgcttaagagcaaaatgataaatctggttgatatttgagcggaaagaggatgcgagtgcatcctctgggcaaagcgagttatcgcttgtgcagatgggattaaagcaggtaatcgccagcagcttctggctggtattcgagttccagcacttcaaggtgggttgcaacgccgcccggcagttcccagtgaatggaatcgccaacgcgcagccccagcagtgcggcacctaccggagccataacggaaagctgagtattgctgtcggtcatttttgccggatacaccagcgtgcgcacacgcacttcgccatcgctaagattgcggaatttaacccggctgttcattgtcaccacgtcgtgtggcatctcttctggcgaacacatttgggcgcgatccaactctgcgtttaacgcgtcggcgattggcaaaccagcataggcgggttgctccagcagaatatcgatgcgttcggcatccaggtcgttaatgatgatagttggtctggacatttttactccatgtcgtcggtactgcgagtgtcgcagataaacatacccaaaagaaaaccctcaccgtcaggcggcgagggtttaactcacatgatgatactgactgttgctcactctttgaagtgatttgcgtcacattcagggaattcctcaatgtagcgcattatgtataaatcttaatcgtcatggtttatggaagacgaattagcgtgttttgtaaatcagaggattaataacctgctttatcaatcacaaaggttttgccacagttgcctgggtgtggttgtggcaagaatgagttggcagaaagcggagcgttgatggcgtcagctttgatcgagatctgaatttcagtcaaatacgcagggttaccctggcacgttagcttaactgctttcacgttctcttttccccagcttttggcaaaggcggcatcaaagtcacggcggctcactgttttaccgtagttatccgcaaggaattttccggcttcgctctctttaatttcttgattcaggcgtaccatcgtgccgaagtatgcgtctggatcaaaaccaaagcaggcaccgtgtttggcatattcgtagcgttccaggcaggaacgtccgccagctcctggcatgacttcacttagtttagcggccgtttccagtgataacccggtttccggcgatgaacacattcggctggcgcgcgcttctggtagattcgggattgggcgagtagcgcaaccgaagcgcatccagcggcgttcatcaacaccacgggcagcaaccgatttaggcaatcctggccacagaccatgtacggtcagaaaatcagctttgttggtcgtttcggtttgcaggcgacattcatctcgttcgttacgatttcgatcgtgttgactctggcaaaatccggtttgccaggagagggccaggacatagcgatcaaaatcgccatactgttttgcctgcaacgccacggcgttggcagaagagaagggaagcagagaaaccgcgagcaacgcggcgttacgccagaatgctttcataatgggtgtggaactcatacatacactgaatattatctattaaatcataaaaaagcccgcctggtgggcttacctggcgggcgtgatgatttattcagcgtttggcgaacgtattagttccacatggcgagaatcggccagccaaccaacagcagcatagagatgtaaatcaccccgaagattgcgccaagacgccagtaatcttttgatttcacatagccacagccgtaaataatcaccccaggaccggttgcatacggcgtcagacagcccatgataccgatagacagtaccagcaggatacacagttgttccattggtacgcccggaatccctttaccgacggccagaataaccggcagcatggttgcggtgtgcgcagacaggctggcaaacaggtagtgtgcaaagtagaacaccagaaccagtacaatcaccgttgcgtttggtgagaagccttccaggtgtgtactcatcgtgttggcgaaccagtcgataaagccagaacgggtcaggccattcgccataacaaccagcgttgccaggttgaccagcgtgttccatgcgctgttatagcgagtaatgtctttccacggcacaacgtgcagcgccagcatcagcgaaactgccagcagacctaccgcagtagcattaatgacttcactgccaaatacccacaaacctaagctgagcaatacaaggccaatcagcgtccactctctgcgcgtcagcgcacccatggtttttagttcatcacccgcccaggttgccacttcttcactgtgtgtgatttccggtttgtacagcacgtaggaaagccacggcgcaatgataagcaagataaccccaaccggcaggaagcagaggaaccactgcaaccagctaatctggataccggcaattttgctgacgaactccagacccagcacgtttggtgccgcaccggtgacaaacatggacgaactcagactggtactaatgaccatcatccacatcaaatagccgccaatacgacgcgcggacggatcgttcgggaatgatttaaacagcggcggcaggtttttaatgaccggaaaaaccgtacccccggtacgcgcggtgttggacggtgtaaacggtgccagcagaatgtcgataatgacaatcgcataacccaacgtcagcgtgcgtttgcccatgaatttcaccaggaaaagggcaatgcgacgacctaacccggaaacttcataccctaatgcaaaaataaatgcgccaaataccagccataccgtggtgctggaaaaaccagccagaccccatttcagcgcctgtttttgcgcattaaacgctgggtcagctaattctttggcatcaaagagcaggtaattactgccaataacgcaaatagtaaccgcaataaaactgatcgccgttgccggaattggctcgaggatcatgccgacaatcattgccacaaacactgcaaagtaatgccacgcctgcggcggcataccgtcaggtacagggataagaaacatgacacccatcaccaccaggggcgccaataatttccatatattatcttttgctaaagacatacgggttctccgaaaattaatatttccaaatttatcaagtgcttaaataattaaatctgtgctaaaaaccaggtaagaatcagcaggtcggcactgccgcctggactgatatttcgttcgatacactccctgtcgaactgccggagataatcgagatcggcgggggttcggatgcccccattgtttaataatgtttgcgcctcgcgctgtagccagcgcaggcccccctcgccaccgcgcgatgcaacgttggtatcgccgttggtagccatcagtaggagcaaggtatcgagcaatgccagctcaggatctaacccctgatccagcagagtgaggtaatgcggcaaggcgtggttgatcaccagtggataacccgcttcggcttcaccgcgtgcgccggtaaggccaagctgctggtacaaccgttgacctgccgtcagttgtgaattattggtacgcagttcgcgatcggtcaggccacggcagaaacttgccgccgtcgcacaaattgttattggcgttaccgactggttgagttgaagcaaacggccaattgccgcacacagtagccctaaagaaaaaatgctgcctttatgcgtgtttacgcccgcagtggcgcggaacatatcaccttcgcaagccataccaattgggcgtaatccgttgagtaccgcttccggtgccatttctgcactacaggcaccaaattcaatgaaacggggtaaccagccctgaatcgccagcgcgctgcggtggaaatcttccagcgccatatctttgtgcgcaccgcagttaatgcgatccacgaggcctggtttcggtgacaggttgacttcagtcagcatggcgcgccagcccagcagggcgtactcatcgattaatgacgtcgcaagctttgtggttttagttgacgttgcaggcatcgacatcgttcagcagcgcctccatgcggttgagtaaatcggtcagttgatgggtttttccacgcgcgcaaacagctgcgctttgctcgcacaacaggcagcggcgaggcggcagtgaataatcgcggcgggagagaatgtcgccttcgggcgtcaggacatcgatatcccataaccgcccgagaggatgactatgttcaagctcaatggtggcgagcttgaggtcgcgagccggggcggcaatgctcaacatgccctccggcccgctggcggaaaccagtgcagcctgctcctgaatttgccagccctgttttgcggctaaggcacgcaaggctgtcacgccatgattaaaaattcggcgtgtgacctcgctgtctttaatcggcccaggcgcaaccacggtaaaggagaccagtggaacaggatggcgcttgagccaggcgtgttgccgtgcttgcctttcatcccggctgacgagcagctcgggaattgacaccgcatggtggctggcgagttcaggaagcaggtgcatggcttattccttcacctgatgcacaacatcgatcaccgagccatcgcggtaacgcacaacggcaacgacgcggtcggtgaattcaatcggctgtggttcaccggtcagcagacgcgcacgttcacgcagccactcaatagaaaccactttgatccccgcttcctgcagacgttctgccagctccggacgtgccgggttaacagcgatgccgtggtctgtgaccagaatatcgacactggagcccggggtgatgcaggtcagcacgttatccaccagcgtcggaatacgaccgcgtaccagcggcgcgacgatgatggaaagcgcagaagcaatcgcggtatcgcagtgaccaccggaagcaccacgcagtacgccgtcagagccggtcagcacgttaacgttgaactgggtgtcaatttccagcgcgctcagtaccaccacgtcgagacgatcaaccgctgcgcctttcgacccccagttagcgtactggttggcgctgatttcgatgtgattggggttacgggccagcgattgcgcagcatggctgtcaaagctctgcacatccagcagtttgcggatcaaacctttttcgtgcagatcaaccatcgttgcggtaataccgccgagggcgaagtcggcgcgaatatcgcggctacgcattttgtcttccaggaaacgggttaccgccagcgaagcgccgccggtgccggtctgcatggagaaaccttctttgaagtagccagagttaacaatcacatccgcagcgctacgggcaataagcagttcgcgcgggttagtggtcatacgggtagcaccagcgccgatttttgcagcatcgccaacgcgatcaactttgacgatcagatcaacctgatcttgctcaatgcttgccggattatgcggataaggcagcagttcttcggtaagcatcacgacctgttttgcgttgtcggcatcaaccattgcatagccgagggagccgcagcaggctttaccggagtagccgttggcattaccgaattcatcacaggacgggacgccgaggaaagccacatcgatattcagttcgccgctctgtaccagatgcacacgtccgccgtgagagtggatttgcaccggttccgccagcagaccacgggagatttcttccgccagtggaccgcgcaggccagaggtataaatgcgggtaaccacgccctggcgaatgtgttctaccagtggcgcatggcaatcactcagggagctggaggccagagtcaggtttttaaagcccatcttcgcgatgacgtccatcaccatattgacggtcaggtcaccgccacggaaagcgtgatggaaggaaaccgtcatgccgtcctgtaaaccagagcgacgaatcgcttcttccaggttggcgcacagtttgcgatcgcgcgctttttcagcctggtaggtttgctttggcgagttctggaaagcggcaagatcgcattcagcgcgacgattccaggccgctacccgttcttgtcgttgagattgttcaattttctgcgtcattttgattgccttattcttcgcggatgccggaaagttctgcgcgggagagcaccagacgggcgcgatcgataaccggaccgtccaccatcttgccgttcagggaaaccacgccgaggccttcgcgagcggcggcttcagcggcttctacgacgcggcgggcgtgatccacttctttctgggtcggtgcgtagaggttgtgcagcagatcaatctgacgcgggttgatcagcgatttgccgtcaaagcccagctgtttgatgtgggcggcttcttgcaggaatccggcttcgttgttagcgtcggaatagacggtatcgaacgcctgaatacccgcagaacgcgcggcctgcaaaatggagcagcgagcgaacagcagttcagttccttccggggagcgttctgtacgcaggttgcgcacatagtcttctgcaccgagggcgataccgatcaaacgctcggaagcgtgagcgatttctaccgcgcgggtaatgcccagcggagattcaatcgccgccagcaggccggtactgccgggttcacgaccacaggctttttcgatacgcaggatctctttttcgatatccagaacatcctgagcggtatcggttttcggcagacgcacaacgtccgcaccaccgcgaacgacggcttccaggtcgttaacaccccattcggaatccagcgcgtttacacgcacaatggtttcaatatcgcgataaagcggatgttgcagcgcgtggtaaaccatgcggcgggcggtgtctttttcacgcaatgcaacggagtcttcgaggtcaaacatcagggcatcagccgggtagatgaaggagttgctgaccatcgcggcattagcaccaggcacaaacaacatactgcggcgggtgcgagttttacgttgttgcagcgaagcggaaatcattggcaatcctcccatggcagagccgggataccgctggcgcgtgccagcagggcttccagtcgtgcacgtaaaatgcagtccagtgcgcctttgtcatcgacattcagctgtacgccgcgcacgttgtagcgggcgagaacttccagaatggtggtgcgaattgcatcgccaaactgtttctcaacgctgctgttgatttgcaggtcgatatcctgcgtatcgagtggggcgatgcgtatcatcacatccccagactcaagggtgcctgcaacggcgggctggtttattttcatttttcacctgtttctcatgcgggggtcttttgacgagctgccgcgtcctggcgggagtgctcaagcaggttctgcaaataatgcagcgtgactgcagggaccagcggcgcgatagccgtgagatcgttttttgccagcagttgacgtacccgggaagcggatatcggcatctcctggtaacgcagccgctcaatttcaaccagttcgatgggcggtgcggagatagtcggtgtttccagccagtagcgcatatcctggttgtactgggcagtaacgcgacaaaagggttcagtaccgacaaagcggtgagttacacccagcgcgggagcgaggtactgacggaaaatcttcagatcaatttcggtgtaacaatggttaatgacgctctgttctttaatgaagtagcaagggaacgtagcgcgggagatgatgtattcggagccgcgatgcacagtcaggcgtggaatatcggcggtgccttttaacaccagatccagccggtcttcataggggaagcgtgaagaatcttctttgactaaaaacagatgcaaccagtcgcactgtgccgcagcctgttgaatcagataacggtgaccattcgtaaagggattggcgttcatcacaatgcagccaatcttgttccctggatgacgaaattttttcagcgattcggcatagcgtttcagtcgcgtggcgctgttttccatcagcaccatcacgccgggtacgctggtcagcgtggaaaaaccgcactggcggaacagcgcctcgtattcggttttggtataaataaacagatgcgtgctatgccgctcataggcgaggtttatcagttcagtggctaatgtcagcgccagtccttcaccgcgaacggattcactgatagcaacgcatttaataatatttccggcaattccaccgcacgcgataagcttttcatcgcgggttacggtaataaatacttcgactgtggtgtcaacgctcaaatcattttcatgcaggaattgggcgatttccgccatttttttattttctgaacgttttacgcgggtgaaaatatcattgccgaacataataaatagtatcctgaaggtgcatgttgttatcgatttgcaacgaatgttgttcaatgttgcaaattgataaccttttattttcacttgggagaaaggggggcgatcgaggtatatctttttctcctttcgctatacatcctaaggagtatttcggcgtgaaattttgatttatttcacatagagttagtggttttttatttatttaatggttttaagttttttaactaatgtaattacgaaataacccgcaggtttaagtgatttaattgatttaatgaataaaatttgccacgatcatatttaatatctatgtattttgattcaacattttaattacatccgtcaaagaggctcgggacaacccgcaaggaaaacaatgttgcagcttaaagagaataaacagtttgcatttttccaaagactggcatttccgctgcgtatctttttgctgattctggtgttctcaatatttgtcattgcagccctggcgcaatattttacagccagttttgaggactatttaacgcttcatgtgcgcgacatggcaatgaatcaggcaaaaattattgcttctaatgacagtatcatcagtgcagtgaaaacgcgtgactacaagaggctggcgaccatcgctgacaaattacaaagagatactgatttcgattatgtggtgattggcgatcggcactcgattcgtctttaccatcctaatccggagaaaattggttatcctatgcagttcaccaaaccgggcgcgctggagaaaggggagagctacttcatcaccgggaaagggtcaattggcatggcgatgcgtgccaaaacgccaatctttgatgacgatggaaaagtcatcggcgtggtgtcgattggctatctggtgagtaaaatcgatagctggcgggctgagtttttattaccgatggcaggcgtgtttgtcgtgctgttagggattttgatgttgctgtcgtggttcctggccgcgcatatccgtcggcagatgatgggcatggagccaaagcaaatcgctcgcgtagtccgtcagcaagaggcgctgtttagttcggtttatgaagggctgattgcggtggatccgcacgggtacattaccgccatcaatcgtaacgcaagaaagatgctggggctgagttcccccggacggcaatggttgggtaaacccattgctgaagtggtcaggcccgccgatttctttaccgaacagattgatgaaaaacgtcaggatgtggtggcgaactttaacggtctgagcgttattgccaaccgggaagctattcgttctggcgatgatttactgggggccattattagctttcgtagtaaagacgaaatttccaccctcaatgcgcaactgacgcaaattaaacaatacgtcgagagccttcgtacattgcgacacgagcatctcaattggatgtcgacgctcaatggtctgttgcagatgaaagagtatgatcgcgtgctggcgatggtgcagggggagtctcaggcccagcaacagcttattgacagcctgcgtgaggcgtttgccgatcgccaggtggcggggctgctttttggtaaagtgcagcgcgcccgcgaactggggctaaaaatggtcatcgtccccggtagccagctttcgcaactgccgccaggactggacagcaccgagtttgcagccattgttggcaatttacttgataacgccttcgaagcaagcctgcgtagcgatgaaggaaacaagagcgttgaattattcctcagcgatgaaggcgatgatgtggtgattgaagtcgccgatcagggctgcggcgttccagagtctctacgagacaaaatatttgagcagggtgtcagtacgcgtgctgacgagcccggtgaacatggcattgggttgtacttgattgccagctacgtaacgcgctgcggtggtgttatcactctcgaagataatgatccctgcggtaccttattttcaatctatattccgaaagtgaaacctaatgacagctccattaaccctattgatcgttgaggacgaaacgccgctggcagagatgcatgcggaatatattcgtcacattcccggattcagtcagatattactggcgggaaacctggcgcaggcccgaatgatgatcgagcgttttaagccggggctaatcttgctcgataactatcttcctgacggtagagggattaatttactgcatgaactggtgcaggcgcattatcccggcgacgtggtgtttaccactgcagccagcgatatggaaacggtgtctgaagccgtacgttgtggtgtatttgattatctcattaagcccattgcctatgaacggttggggcaaacgctaacccgtttccgccagcgtaaacatatgctggaaagtattgatagcgccagccagaagcaaattgatgagatgtttaatgcctatgctcgcggtgaacccaaagacgaactgccgaccggcattgaccccttgacgctaaacgcggtgcgaaaactgttcaaagagcctggtgtgcaacatacggcagaaacggtggcgcaggcactgaccatcagccgcaccactgccaggcgttatcttgaatattgcgccagccgccatctgattattgctgaaattgttcacggcaaagttggcagaccgcaacgcatataccacagtgggtgacatgataaagccggaggaaacttgcctccggcattactatttacttgcctgtgaccgctgctgccgttcctggcaccatcagctctgtagcaacgataacaatcaccaaaccaacaagcaccggcaccgaggtgcgttttacgacttcaaacggcgagatcttcgccatcccggcaaccgcaacgactacgccagaaacgggtgatagggtacgacccaggtttgacgcctgcagcatcgggatagtcaaatacgccgggttaatgccggaggagtgcgccagtttcgggatcatctcaacaaacgcataaaacggcgcattgcctgaaccggtcgtgactgccgccagcattgtcaggatcaccaataccagcatcaggatgatactcgccgaaccaaacgaggtagcgatagaaatcagactttgaataaagccgatggtgctaagcccctgagcgaataccccagcggcaaccagcagcatcaccacgttagcaaatgcatctgccataccgcgataagccacttccagaccagagaaaactttctgggtattaaagctgcggatgaactccagaatggaggcaattagcatacaaatcaccagaatagtgatgatgtgtaattgcggaccccatttgccgtcaaaaatcagtactccgatgatcggcgtgaacggcaaaatggcataaaacgcaggggcagtggtggtgatttcactgacatctaacatttcatgagagatgtgctcttttttatccagataacgttgccagaagaagtgggcgatcgccatgccgataattgcagcaattgagataggcagcgttgttttgaaggcgaagtcaatcagcgacatttcggaagcctgcgccgccagcaccacatcccctgaagtcggtgcgagaataatcgccgccggggaggcacaaatggcagcagctgcgccacgactgataccaacgtttaccatcaccggaaacagggttgccatcagcaaaacacccagaccggttgcggaagagacggccagtgacatcagacaggcaacaaaataggcggcaatcatcagaaggtaaggggagttaatatactgcaatggttttgacgccagcttgaccaccatatcattcgcgccgatatgggtcatgtaagcggcaaagccacacagcatcataatcatcatgccgaggtcgccgccgcggctcattagcaatattttaacgtattcaacgatatccgtggcgctgtagcctgttgaagcctggctggacggtaacactttgtgccccataatggcactgataatcagcaataacaggccaccgacaaataacacgccagtggcagaataccctttaatgatgtagcgagctacacccacaataaccacaaccccaataaggagttcaatgaatgtcagcataatttttcctgtctccaggccccaaagtaaataataaaaaattcctaaaagttaaggaaaaaatatgcccaataaattggcggtgaatgctgattaaaatcaagaaaaactgccattaagacattgaagttgctgtttttatacgtagataacaaaacgcatatttagcggttggcaaatatcacataataatgtgtgtaaattgatggtggattgatgcaaatttgttaattgtaaggtgttagctgcggttgtgtgctcaaaaaataatcttccatgagcatgagttgacgatacataatatatttttcgttaagatattttttatatcttattaaaaaataaagtaatttttatcggttgtattttgttatcagaaacgacttggtttttcttttatgactattcccatcgcagaaaacgatgcgtcgtctttaatcgatgcgcggaaatatttatcttgaactagcggaaataaatagggcagctattcatattattcttcatgttggggctattgaggttatgttaattgtagctttgctatgttagtagtagatttttgataaatgtttaatggtcacaaatgaacgtgagtaaatatgtcgctatatttttctttgtttttattcagttaatcagtgttggtaaagtttttgctaacgctgatgagtggatgacaacgtttagagaaaatattgcacaaacctggcaacagccagaacattatgatttatatattcctgccatcacctggcatgcacgttttgcttacgacaaagaaaaaaccgatcgctataacgagcgaccgtggggcggcggttttggtcagtcgcgttgggatgaaaaaggaaactggcatggcctgtatgccatggcatttaaggactcgtggaacaaatgggaaccgattgccggatacggatgggaaagtacctggcgaccgctggcggatgaaaattttcatttaggcctgggatttaccgctggcgtaacggcgcgcgataactggaattacatccctcttccggttctactgccattggcctctgtggggtatggccccgcgacgtttcagatgacctacattccgggtacctacaacaatggcaatgtgtactttgcctggatgcgctttcagttttgagacaaatgaagttttagtaaatcctttaaaatcaaccagtaaaataattaacatcaaaaataacgcgacttttatcactttttagtaaagttgcactggacaaagcgtaccacaattggtgtactggtaaccgacacagcatttgtgtctatttttcatgtaaaggtaattttgatgtctaagattaaaggtaacgttaagtggtttaatgagtccaaaggattcggtttcattactccggaagacggcagcaaagacgtgttcgtacacttctctgcaatccagactaatggttttaaaactcttgctgaaggtcagcgcgtagagttcgaaatcactaacggtgccaaaggcccttctgctgcaaacgtaatcgctctgtaagatacgtcagcaagaattcaaaacccgcttaatcagcgggttttttttggtttttagtgtgcggttgaggccgaaaacagccagaaagccagtgcggtcatagcaaaagaccccaaaagattgacgaaaacgttcagtaacgcccagccaaagcggccctcttgtaacaaaaacaccacttctgccgaaaatgttgagaaggttgttagaccgccacaaaatccggtggtgattaatactttccacactggatcaatgttcgtcatcctgctgaaccaggcgaatcccattcctatgatgaatgccccaatcaggtttgctgccagcgtccccaacggaatcgcctgatgcagcgggttaaatcgcatacttaacagccatctcgccacgcttcccgtaccaccgccaataaaaactgctaaaagaagttgtaacactgcaaaatcctgctatttgatttgtatgagtgataagtgtaacgccgaataatcgccgttggcgaattttacgactctgacaggaggtggcaatgctggttgccgcaggacagtttgctgttacatctgtgtgggaaaagaacgctgagatttgtgcctcgttgatggcgcaggcggcggaaaacgaggtttcgctgtttgtcctgccggaagcattactggcgcgtgatgatcatgatgcggatctttcggttaaatcagcacagctgctggaaggcgaattcctcgaccgtttacggcgagaaagtaaacgtaacatgatgacgacaattctgacgattcatgttccttcaacaccggggcgcgcgtggaatatgctggtggcgctacaggcaggaaacatcgtcgcccgttatgccaaactgcatctctatgatgcatttgccattcaggaatcacgccatgttgatgctggtaatgaaatagctccgttactggaggtggaagggatgaaggtcggtctgatgacctgttatgacttacgctttccagagctggcgctggcacaggcattacagggagctgaaatcctggtacttcctgccgcctgggttcgtgggccgctcaaagagcatcactggtcaacgttgcttgccgctcgtgcgctggataccacctgttatatggtggcggcgggggagtgcgggaataaaaatatcgggcaaagccggattatagatccctttggcgtcaccattgcggcagcgtcagaaatgcctgcactcattatggcggaagtgacgcccgaacgtgtgcgtcaggtacgcgcgcaactgcccgtcttaaacaaccgtcgctttgcgccgccgcaattattatgatgtttttttactcggcgcttgattcaccttgttacagattgctattgtgtgcgcgcgtcgaatgaccgttaatattctctggtttttaaggcgcgttctgttgccggttatatgtcaagaaggtatctatgggtgagattagtattaccaaactgctggtagttgcggcgctggtcgttctgctgtttgggactaagaagttacgtacgctgggcggagaccttggagcggccattaaagggttcaagaaggcgatgaatgatgacgatgctgcggcgaaaaaaggcgcagacgttgatcttcaggctgaaaagctctctcataaagagtgacgtggcgagcaggacgctccctcaatatcttgttcgatacaaaaacccgcttcaaaaagcgggttttttatcagacagatgtaagtaattattacaggattacttaacttccatccctttcgcctgcaaatcggcgtggtaagaagagcggacaaacggaccgcatgcagcatgggtaaagcccatcgccagcgcttcggctttcatttcgtcgaactcatccgggctaacgtaacgttgaaccggcaggtgatggcggcttggctgcaaatattgccccagcgttagcatcgtcacaccatgacggcgcaggtcgcgcattacctcaataatttcttcattggtttcacccagtcccaccatcagaccagacttggtcggtatttccggatgcgcttctttaaagcgttccagcagcttaagcgaccagttgtaatctgcaccaggccgtacctgacggtaaatacgcggtacgttttccaggttatggttgaacacatctggtggcgttgcagtcagaatatccagagcacgatccatacgaccgcggaaatccggcaccagagtttcaattttgatttgcgggcttttttcccgaatggcagtaatgcaatccgcaaagtgctgggcaccgccatcgcgcaggtcatcacggtcaacggaggtgataaccacataacgcagcgccatatcggcaatggtctgcgccagtttcactggttcattggcatcaggagctaccgggcgaccgtgggcaacgtcacagaacgggcaacggcgggtacaaatagcgccgaggatcataaacgttgctgtgccgtggttaaagcattccgccaggttagggcaggaggcttcctcgcagacagaatgcaggccatttttgcgcattgcggctttgatgccctggatacgtgtagagtccgctggaagcttgattttcatccattccggcttgcgcagcagggcttcgcgctctgttgccacgtttttaaccgggataagggccatcttatcggcatcgcggtatttaacaccgcgttccatcacaatgggtttactcatagcgtgcgtgttccagttgcgaattacgaaggaaagcgtttcaattcaatagattgttgtaattatcaactatttttgaattaacgactggcagtatatcattgaaacggacctgaaagcagccaaagcggtcgcgaaaatgtaaaattgttgttggattgtgccattttatcgttctgcgctgtgatctggctgtaacaatactttttcaaaatgcattacggataacatctatggtcctgtgcaaaacatgttatcggtgatgagatcggtttgaaactgactgagttggttttccgcgccgctgatgggcgggttgcgcagtaaaagctgtggatagtgagttttaatcgcccgatagatgacaggaaggaccagggctccgaccgagggggggcagattaagcactttcgctgcattaacgattcctttatggacatatgcaacttcaaaatagtcagaagagtaagatcaatatttcgtaaggttgtaaatatttgtggtttaccttctgacgattttctacttaaacagggttcaatttgattattactatccacgcacttactcaaattttattcatggaaaaataatatttataaaaatcacaataatcttatgtctaattgggacggaacgcttttgctcaccatggtaattatttcaatgagttaaccaattgggtgagctacggagcaaggcgtagcatcgcatttctgcaagtgataaagaaaatatacaaacgcgaaggagatgtaaagcattagcaggtattatgagtaatgacccagtgtaaattgggccattgatgtatggaattaagcggtaatatattcgaagtcaggattgtttagtagcgctaaaatattttccagtaaacgtggtgcaatattattagtcgtcgcttcgggtttccattgtgatattttagccatttccattcctgcatacccacaaggattaatacgtaaaaatggtgaaagatccatattgacgtttaatgccagaccgtggaatgaacaaccgcgtcgaatacgtaaacccagtgagcaaattttcttttccccgacatagacaccaggcgcgtcagcccgaggatgcgcttctatacccagttcagccagggtattcaccactgtttgctcaagcaaggtcaccagttcacgcacaccgagtttacggcgtttcaggttaagcaacacatacatcacctgttgccccggcccgtgataagtcacctgcccaccgcgatcgctctggatcaccggaatatcacccggcattaaaatatgctccgcctttcctgcctgcccttgggtgaataccggatagtgctcgaccagccagatttcatcaagggtactatcatcgcgggtatcggtgaattcatgcatagcctgggagattggctcgtaaggctgaagaccgagctggcggacaagaattttatcctgatacaaaacggcatctccgtggagaatgagtaaaagtgggggaaaagtatatcacagcgaggagaggggagttacccgaccaggagccgggtaacggagaagcgagttacagaaccatgcggacaatatcgattttgcccagttcttcatacagtgtttcaacctgctcgatatgagtggcgttgatagtgatagataccgagtggtagttgcctttgctgcttggttttaccgttggggtgtagtcacctggcgcatggcgctgtaccacttcaaccacctgatcaaccagctcaggtaacgcctgccccataactttgtaagtaaaaggagtagggaattcaagcagttcgttaagtttggttttcatgtcagctccggcgtaacgtaattaaatagcaactcccgccagaaggcgggagttttttactgatgcttagtatatggggacggaaattacactttcaagtgttcaatttttaaccaaaccagtgatggaacattaatttaatgtaatcaatgattttgccgaagaagttaccttccggtatttcttgcagcacaaccagcgggcgttgttcgatcgttttgccatcaagctggaagttgatagttccgacgacctgattcttttgcagcggcgcatgcaattcactgctgttcagcacatagctggctttcagatctttcatgcgaccacgcggaatggtcaggtacacgtctttatcaacccctaacgaagcgcgatcagaatcaccaaaccaaaccggttcagaggcgaactctttacctactttcagtgggttaacggtttcgaagaaacggaagccccaggttagcaattttttactttcggcttcacggcctttaaaagtacgtccgcccatcaccgcagagatcaagcgcatctggccttcagtcgcagaagcaacaaggttgtaccctgctttgtcagtgtgtccggttttgatgccgtcgacattcaggctgttatcccataacaggccgttacggttcagctggcgaataccgttaaacgtaaattctttttctttatagatcgagtattcattcggtacgtcacggatcaacgcctggccgatcagcgccatatctcgcgcggagctgtactgaccatcagcatccagaccgtgtaccgtctggaagtgggtatttttcaggcccagggcgttaacgtagctgttcatcaagccaacaaaagcgtcctggctaccagcggcaaaatcggccatggcgacacaagcatcgttacccgattgcaggttaataccgcggatcagctgagaaaccggaacctgcatgcccggtttgaggaacatcagcgaagaacctttaaacaccgggttaccggtggcccatgcgtcgttgccgatagtgactaaatcagtttctttaaatttaccggctttcattgcctggccgataacgtaactggtcatcattttggtcaggctggcaggatcgcggcggacatcagcgttctgttcggcgagtactttgccggagttgtagtcaatcaggatgtaggactccgcgtcgatctgcggtacacccgggatcatggttttgatattcaggtcatcggcatgtgcagcagagataaaggctgtgcaaagagccgtggtgagcgccaggcgcttcatgatacgagcggaaaaaatggtattcatggtctgaactacgacatccgtgatggaattaaaaaaagtgccctactatagcaaatgcactaccggcaggcatctgactttccgcgtgactttgttaacgtcatttacagaaattgacacatcagatgcctgctttacgctactgcgcggtggtaataaatgactgtaattgggcttcggtttgcaaacgttgctgcaaggtactggcttcggctttgctggcgaatgggccaagctggatccgccagaccgcgccattttgagttacgcgaccggggacgccgaacttctgtcccagttgctgttggtactgttgcgcacgagcctgatcgctaacggccccgacttgcaccataaagttgccgctggcgctttgcgaggcggcttgcggtgtcaccattgcaggtgaggttgcaggcgttgtcgacggagctgtaacaacgggctgtggcgcaggcgtcggttcgctgccttccagtacaccaggcgctaaggtcgttggtgcgccgaggaaaccgctgctggttaccggcgcgccggtcggatcttcgctttttagcgtcgaattactgaccggaagaatgtcaccctgcgggacaggcactgaacttgttcccgcgccaccgcttaaatcgggaggtgctggcagggcgtaagtctgtttggcgactgtggtacaagccataccaggaccagaaagcgaaccatcctgggcgacaataatcggatcgatacgaactttggtgttgtttgacgtgttaagacggtcagctgccgcgcgagaaagcgaaatcacgcggtcgttgccataagggccgcgatcattaatgcgcaccacgatcattcgcccgttagccaggttagtgattctggcgtagctggggattggaagcgttggatgggccgccgtcaactgtgtcggatcgaaagcttcgccagaggccgtcaggttactgccgggttcggcatcatagattgccgccagtcccgcctggctaaatcgagacggatcctgcacgattttgtagcttttaccgtcgcgctggtaatcctgatttgccgtcgcgttcagtggttcgaaacgcgggtctgccccgctaatttcaactatggggccgttacataccgcaggctgcggtacacttaccgtctgttgctgaccatcatcgcttgtacatgccgcgagcattcctgccgcgatgcagatcccgagccactgcttacgcattgcgcacctcttacacgcttttcgacaacattttcctgtgggtgtggattgacattacaatcccgaacccagccatcagcacaattagcgccgatcctccataactgaccagtgggagcggaacccctacaaccggcagaataccgcttaccataccaatatttacgaagacataaacgaataatatcagcattaagccgccagccatgacgcgaccaaaggtggtttgcgctctggcggctatccacagcccgcgcatgatcagcagaatgtagagagcgagcagaatcaaaatgcccactaatcccagctcttccgccagtaccgcgaagataaagtcggtatggcgttcggggagaaattcaagctgtgactgagtgccgtgcagccagcctttgccgcgtaatccgccggagccaatagcaattttagactgaataatgtgatagcctgcgccgagtgggtctgattccgggtccaggagcatcattacgcgctggcgctggtaatcatgcatcaggaagaaccacagaatcggaatgaacgccgctaccagcactactgcgacgccaatcagacgccagctaaggccagagaggaacagtacaaacaggccggaaagcgcaacgaggattgatgttcccaggtcaggctgtgcagccaccagcagcgtgggcataaatatcagcaccagcgcgatagctgtattcttcaatgaaggtgggcaaacgtcgcggttgataaagcgtgcaaccatcaacggtacggctatcttggcaatttccgacggttgaaaacgaacaataccgaggtccagccagcgttgagcgcctttagagatggcaccgaaagcatctaccgccaccagcaaaataatacagatgatatagagatagggggcccagccttcataaacgcgtggaggaatttgcgccatcaccaccatgatgaccagacccatcgtaatctggccgattttacgctccatcatgccaatatcctgaccgctggcgctccagataaccagggcgctgtaaaccagcaatgccagtaagatcagcagcattgtgggatcgagatggactttatcccagaatgtttttttattcggattatccgtcatgattaatggtcctccgctgcggcaaccgctggattttccgcaggcagatcggtgttgttatcacccagcataatgtggtcgaggatctggcgcatcagcgtaccaaccgccggacccgcgccaccgttctccagaatcatggcgacagccacttgcggattgttgtatggcgcaaaggcggtcatcagtttgtggtcacgtaaacgctcggcaattttgtgcgcattataggtttcgttcgctttcagaccgaagacctgagcggtaccggatttcgccgcaattttgtacggtgcgctggcaaaatatttatgcgccgtaccgttagggcggttagcaacaccgtacataccgtctttcgccagctcccagtaaccggaatgaatatcgccgacgggcggttcatgcggttgtacccatggcacctgtttgccgtcttcggcggtgctcatcagcaaatgcggaaccttcacgataccgtcattaatcaggatcatcagtgccttactcatctggataggggtcgccgtccagtaaccctgaccgataccaaccggaatggtgtcaccctgataccacggttttttaaagcgtttttgtttccattcgcgggttggcatgttaccggaacgttcttccgccaggtcgataccggtgtaatgaccataaccgaatttccccatccattcggagaggcgatcgatccccatatcgtaggccacctgatagaagaaggtatccgcagattcttccagcgatcttgtgacattcagacgcccgtggccccattttttccagtcacgataacgtttttccgaacctggaagttgccaccagccggggtcaaacagcgtcgtattgcgcgtgatcaccccggcactcaatgccgaaaccgcaacatagggtttaactgtagacgcgggaggataaaccccctgtgtggcgcggttcaccaacggtgtattcgggtcgttcagcaaggcggaataatctttgctggagataccgtcaacaaacaggtttgggtcataactaggcgtggaaaccagcgccaacaccccacctgtacgcggatcggtgactaccacagctgcgcggctacccgccagcagcgtttcaatatattgctggagtttgagatccagcgtcaggtaaatatcgtgtccggcttgcggtggtacttcttttaactggcggataacacgcccacggttgttaacttcaacctcttcataaccggtctgaccgtgcagcacgtcttcatagtaacgttcaatgcccagcttaccgatatcatgcgttgccgcatagttggccagtttgccgtcattattcaggcgttcgacgtctttatcgttgattttcgacacatagccgatgacgtgggtcaacgctgaaccgtaaggatagtaacgacgtttatagcctttaacttcgacgccaggaaaacggtactggttgacggcaaagcgagctacttgtacttcggtcaggttagttttcaccggaatagaggtgaaacggtgtgaacgtgcgcgctcttttcggaatgcagcaatatcatcatcggtcagatcaaccacgctgcgcaaagcgtccagcgtttgctgcacgttatcgactttctccggcatcatttctatctggtagatagtgcggttgagagccagagggataccgttacggtcgtagataatgccgcggctgggtgcgataggcaccagcttaatgcggttttcattagagcgggtctggtagtcggtaaagcgaacaatttgcagattatacaggttggcgataagcacgccggtcagcagcaaaatccccaaaaaggcgaccagcgcccggcgcacaaacagcgcggactctgccgtatagtcgcgaaaagagttctgtagtttcatccgctgcgttttctactcaaagctcacttatcactcacggtgataaggatggttggtggtgatgctccacgcccggtacagactctctgcgaccagcacgcgaaccagcggatggggaagggtaagtgccgacagcgaccagctctgctccgccgccgctttacaggcaggcgacaacccttcaggcccgccaatcagtagactgacgtcgcgaccatccagcttccagcgttccagctcagcggctaactgcggcgtatcccagggcttgcctggaatatcgagggtgacaatgcggtttttgcctgcggccgccaacatctgctcaccctctttgtcgagtatgcgcttgatgtccgcattcttgccgcgttttccggccggaatttcaatcagctcgaagggcatatctttcggaaaacgacgcaggtactcggtaaaaccggtttgtacccagtccggcattttcgttcccacggcgacaagttgcagcttcacgcattaactccagagtttttccagttcatacaggcgacggctctcttcctgcatgacatggacaatcacatcgcccaaatccacgacaatccagtcggcgctgttttcaccttctacgccgagcggtaacaggcccgctgcgcgagactcctgcacaacgtgatcagcaatggacataacatggcggctggacgtacccgtacagatgatcatgcagtcggtgatgctggatttgccctgaacgtctaaggcgatgatgtcctgacctttgaggtcatcaattttgtcgataacaaaatcctggagtgctttaccctgcaagttttccccctgggtgaatcaaatagataaaaatggtctgtcagtatacctgaaccagaggcgatttcgggacaattgtcgccgaatcggctttcgaaagtgggctatcatcccaccccgcgccgcagattgcatcgccatttttgtaaaacaatttctacaaagtcgtgtctggcggaaaaagtctggctgcggagaatatcagcctgcccggggctgtcaatggtcgttgcggcttacccgtaaaaaaacagaaaagtcatgcattctcgacccagatggcacggctattgaggacgcgtagcgtcgcgaatttttggttgatatcaatggcgctccaacacccctggtcaacgcggaaatgccacatagactcggcaggcatgccaattaaacgagcaattaacagactcagtacgccctgatggctgacgactaaaatattctgatagtgctgatattcactaagccttgcgataaatcgttccacacgttgcgaaaatgcctgaaatccttcaccgttcgtggggatagcatgctgccagtcattgcaccacgcgctatagttttcggcatcttcttgcatgaggtcacgatgatgtcgcatctcccagtcgccaaaaaacatttcattgagttcagggatgatatgaacggggtgctggcggtcactgagaacccgtcgcgcggtatgctgtgcccgttccagttcactgcataaaaccaggtcaaaggaaacatcatgtagcagcgtatgcagattttgcgcttgctcaataccgcgcgcggtcaggggtgtgggcgcatgaccgctgtacagaccatcgacattcgcttgcgtttcaccatgacgaattaaccacagtcgcatcatgccctccttaacgacaggtatcagcgatacaagccttgttggttaatgtaagtcagtaccggttccggtaataaatcctcacacgattcaccattttgcaaacgttcgcggatgatggtcgccgagatgttaaaccacggcgtttcagccagataaattttaccggcaggctgaaggtgaagatcttccgggttatgtgtcaaatgatcctccagccattgctgatattgtggttgtgccatttcaagtgggtaaccaggacgccgacagacgatcaaatgtgcattgtcgagtatcgtttcgtattcgtaccaggtcggaaaggtcagcaatgaatcctgaccaataataaacgccagcggcacgtccggtccttgctcctgccgccactctttcagtgtttgcgcagtgtaagagggggcattgcgctttagctcgcgttcatcaagagtaaataatggcttgtcggcaatcgccagttcaagcatgtgtttacgctgcatgctgtttgcttccggctggggacgatgcggaggaacattattagggatgattgtgacccgcgtcagaccaatcaaattcgccagcgtttccacgggtttaagatgaccatagtgcaccggatcaaaggtgccgccaaacagagcctgtaaagatttcatatcaaccgtcgataaatacgtccgccaggggtttatggcacaacagaagagataacccttcaagctctgcccacactgactgaccgtaatcttgtttgagggtgagttccgttcgtgtcaggagttgcacggcctgacgtaactgcgactggcttaagcgatttaacgcctcgctcatcatgccccggcggttctgccatacccgatgcttatcaaacaacgcacgcagtggcgtatgggcagactggcgtttcaggttaaccagtaacaacagttcacgttgtaatgtgcgcaacaaaataaccggttcgctgccttccagacgcagttgctgaagaatatgcaacgcgcgcttactttttcccatcaacaaagcatcaacccaatgaaaaggggtgaaatgcgcggcatcattcaccgcctgttcaacgcgcggtaatgtcagtttgccgtccggccagagtagcgataaacgctccagtgcctgggccagcgccagcaggttaccttcataacagtagcagagcacctgatttgcagcgtcatccagttctaagttgagctgttttgcgcgcgcagcaacccagcggggcagctgagcctgctccggtgtctgacaggtcacctgcacgctgcgattcgcaagagcagtaaaccaggcggcattttcttgcgctttgcttaatttattaccgcggacgatcaacagtagatcgtcatgcagaagtccggtgagtgtgagaagttgttcattgatcgccgcattcggtccgttttcgggtaacaacagcaatagcgtttgtcgactggcaaacaggctcatggcctggcataacgaaaaaatcgcattccagtcggtgttgggatcaatggaaaaagtgtggtgttcttcgaacccttgagccgcagcgacctgacgaacagcgtcctggctttcctgcaataacagaggatcgttaccaagtaaaagatacgccgcgcgcagcccttcattgagctgcgcgcggagttgttccgggtacaaccgaatcatcagttacccagcgtggtggagacgcgtgcaggcgttgccggagtatccgttgtggtcgacgtctgttcttcgtcggaacgaatatccgcagcacggatgcttggcagcttacgaatcagctgttcggcagcacggtcgtacatctcttttacgatcatgtcttgttcgttatctttcgctaacgccatttgcgggttatcgaagaacgaacggaagactttggcgctaatcgggtagatatcacggccggggatcaacacggtcgcattcaccgtcatgatcatctgatactctgctgtttgaccgttacggaataccgatgcggtatctttcgcgatgctcactttacccaaacgcaaggatggaacgtccttacgcgtggtttctttatcaagcaactcgacaccattcagacgtaactgattacgcaccgcacggcttaatggcccgttcggatcgcctgagtccaggatcatgaccttcatagtggaaggaacctgcgtggtgtcacgcagatgccagccacacccggcggtgattaacaccgccagagataacaacaatgttgccagatatcgcacgcttcctcccgcgcttagccaacgaccagattgaggagtttaccgggtacgtaaatcactttacgtacagtaacgccatcaagatattttgctaccagatgttcctggccagcacgttcgcgaacctgttcttccgttgcgtccaccggaacggtgatttttgcacggactttaccgttaacctgcaccacgaccagcgtggagtcttccaccatcgctttttcgtcagcaaccggccacggcgcgttgtcgatatcgccttcgcctttcagttcctgccacagcgtgaagcagatgtgcggggtgaacgggttaagcatacggactaccgccagcagcgcttcctgcatcagggcgcgatcctgctcgccatcggtcggtgctttcgccagtttgttcatcagctccataatcgccgcaattgcggtgttgaaggtctgacgacggccgatatcatcggttactttagcgatagttttatgcacatcgcgacgcagcgctttctgatcttcagtcagcgcatcgacgttcagtgccgcaacatcaccttttgctgtgtgctcgtacaccagtttccagacacgtttcaggaagcggttagccccttccacgccggattcctgccattcgagagtcatatcagccggagaagcaaacatcataaacagacgaacggtgtccgcgccgtaacgttcaaccatcacctgcgggtcgataccgttgttcttcgacttggacattttgctcatgccggtataaaccagttcatggcctgccgcatctttcgctttcacgatacggcctttctcgtcacgttcaacgatagcatcaaccggggaaacccagttacgttcgccgttttcaccaacatagtagaaggcatctgccagcaccataccctgacacagcaactgtttcgctggttcgtcagagttcaccatgcctgcatcacgcatcagtttgtggaagaagcggaagtagagcaggtgcataatggcgtgttcgataccaccaatgtaaatatccaccggcagccagtagttagccgctttggaatccagcataccttctttgtactccgggcaagtgtagcgcgcatagtaccaggaggactccataaaggtgtcgaaagtgtcggtttcacgcagtgctggcataccgttaacggtagtttttgcccattccggatctgctttaatcgggctggtaatgccgtccatcaccacatcttccggcaggatcaccggcagctggtcgtccggggtcggcattacggtaccgtcttccagcgtcaccatcggaatcggcgcgccccagtaacgctgacgagaaacaccccagtcgcgcaggcggtagttcactttacgctcgccaacgcccatcgcagtcagtttatcggcgatggcgttgaaggccgcttcatggtcaagaccattaaactcgccagagttgaacagcacgcctttttcagtcagggcttgctgagaaagatctggctcagagccgtcagctgccaggataaccggtttgatgttcaggccgtatttagaggcaaactcgtagtcgcgctggtcgtgacccggaactgccataactgcgcccgtgccgtattccatcaatacgaagtttgctgcccaaacgggaatttcttcgcccgttaatgggtgaaccgctttaaagccagtatcgacgccttttttctccatcgtcgccatttcagcttcggcaactttggtgttacggcattcgtcaataaaggcggccagttcaggattattttccgccgctttctgtgccagcggatgacccgcagccaccgccaggtaggtacaacccataaaggtgtccgggcgggtagtgtaaacggtcagcgtgttgtcatagtcgttaacgttgaaggtgatttccacgccttcggaacgaccgatccagttacgctgcattgttttaacggtgtctggccagtgatccagtttatccagatcgttgagcagctcgtcagcgtaagcagtgattttgataaaccactgcgggatctctttacgctcaactttggtatcgcagcgccagcagcagccgtcgataacttgttcgttcgccagtacggtctggtcgttcgggcaccagttgaccgcagaagtcttcttatataccaggccttttttatacagttcggtgaagaatttctgttcccaacggtagtattccggcgtacaggtcgccagctcgcggctccagtcataaccaaagcccagcattttgagctggtttttcatatacgcgatgttgtcgtacgtccacggtgctggcgcggtgttgtttttcaccgccgcgccttccgcaggcagaccaaatgcgtcccagccgattggctgcaggacgtttttgcccagcatgcgctggtagcgggcgatcacgtcaccgatggtgtagttgcgaacgtggcccatgtgtagtcgaccagaaggatagggaagcatagacaggcagtaatacttctctttgctctcgtcttcggttacttcaaatgtgcgcttctcatcccagtgaagctgtactttggattctatctcttccgggcggtattgctcttgcatggcagccagtggtcctgttttcaatacggctacaaatgtagcgttgatgtggtttttcagatccgcatagcatagcccaaacgcccgcgtcaaaacagcctttcgcgcactcgacgttgaaatgatgcccggattattcatacattaatttacagagtttgtgggcgtattagcaaagcaaggaacaaagaacgtctattattatagtcagttaacgacccgggagatgaaacgatgaacaaggttgctcaatattaccgtgaactggtcgcgtcactgagcgaacgcctgcgcaatggcgaacgtgatatcgacgcactggtggaacaggcgcgcgagcgcgtaataaaaacaggggagttaacgcgaaccgaggtcgatgagctgacgcgagctgtcagacgtgacctggaagagttcgccatgagctatgaagagagcctgaaagaagagtctgacagcgtctttatgcgggtgattaaagaaagcttgtggcaggagctggcagacatcaccgataaaacgcagcttgaatggcgcgaagttttccaggacctcaatcatcacggggtttatcacagcggagaagtggtagggctgggaaatctggtctgcgagaaatgtcacttccatctcccgatctatacaccggaagtgctgacgctatgcccgaaatgtggtcatgatcagttccagagacgcccgttcgagccgtaatgaaatgagtggcgccggatggcgtgatgtcatccggcgagtgattaagcgtaaaatttcagacgatcagctagtaaatcaacaaagccctgacgatcaacatcgaccattacggtggcattcggtttattgccagtcagataataataatcaacaactgtcataccctgggtatatttcccttgtgtttccacgccaacccagcgctcaacagtggtaaacaactccggtttcaacagccaggcgatggtgcatgggtcatgcagtggtgcgccgacaaagccccatttttcgtctttgtgatattcgaggaagaaatccagcagttcggcaacaatggttgaaacagggttgccaatcgcgcggaaacgctcagtgtcttcaacgtggatttgtgctttgtgagtaacatccagaccggccatcaccaccggaattcctgactggaagacaatttctgccgcttccgggtcaacgtaaatattaaattcagccgcaggcgtccagttaccaagccccattgcgccgcccataatcacgatacgggcaattttgctatgcagttccgggtggctattgagcagcaaggcaacgttagtttgcggtccggtagaaacaatggtgacaggttcctcactttcacgcagcgttttcgccatcagctccaccgccgtacagttttgcggtgcgaacgtcggttccggtaatgccgggccgtcgagaccgctttcgccgtgcacgttgtccgcaataatcaaattacgcattaacggttttaccgcaccgcttgctaccggaatatcggtgcgattaagcaaggtcagcatacgcagaacattgcgtaaggttttttctggtgtctggtttccggcggaagacgtaattgctttgacatcaagctctggtgaggcgagggcgagaactattgcgatagcgtcgtcatgacctgggtcgcaatctaacagaattggcagtgccattgttgctccttgttgtgtgtttctttgcgacaagggtaacgccgggatgtaacagatacgagggacgaaacgagaaagcgtgagatggcgcgcaattgagtatgcgcgccagagtgattaatgcaggatttttgcgaggaagtcttttgcgcggtccgattttggattatcgaagaaagcgcctttcggcgagtcttcgataattttaccctcgtccataaagatcacccgattcgccactttacgggcaaagcccatttcgtgggtcaccaccatcatcgtcattccttcgttcgccagttcgaccatcacgtccagcacttcgttgatcatctccggatccagcgccgacgttggttcgtcgaacagcatggcaataggatccatgcacaatgcgcgagcgatcgccacacgctgctgctgaccgccggaaagctgcgccggaaacttattggcatgtgcggaaagcccgacgcgctccagcaatttcaatgctttttcacgagccggcgctttattgcgtttaagcactttcacctgcgccagggtcaggttttcgataatcgacagatgggggaacagctcgaaatgctgaaacaccatcccgacgcgggaacgcagtttcgccagatcggttttcttgtcgttaaccacgatgccatcgacggtgatttcaccttgctgcaccggttcgaggccgttgactgttttaatcagcgttgatttaccggaaccagacgggccgcaaaccaccacaacttcgccttttttcacttcggttgagcagtcggtcagcacctgaaagtgaccataccattttgaaacatttttcagggtaatcattatgctgtccttcttttcaagtagctgaccaacaacgacgcgctaaggctaataacgaaataaacaaatccggcaaacaggatcatctcaacctgcgtaccatcacgctcaccaatggttgaggcggtacggaagaaatcggccagagataacacatacaccagtgaggtatcctgaaacagtacgatgccctgagtgagcaacagcggcaccatcgcgcggaacgcctgcggcagaataatcagtttcatcgactgccagtgagtcattcccaacgccagcgcggcgctcgactgaccacgagaaatactttgaataccagcacggataatctctgaatagtaggccgcttcaaacatcgaaaacgccaccatcgccgaaattaaacggatatcatttttgggtgataatcccagcacgttttgcagaaaacccggtacgatcaggtaaaaccacagcaaaaccataactaaaggaatcgagcggaatacgttaacgtaggctttggcaaaccacgctacgggcgcaaagctggacaagcgcatcaccgccagcatggtgccccacaaaataccaatcaccactgccgtgacggtgattttcagcgtgatcaccagcccgtcgagcagatatggcagggaaggaacaatggaactccagtcaaactcgtacattatttgccccccatgttgccgggcaggcgaactttacgttcaaccagcgtcatcaccagcatgataaaagcgttaatcaatacatacgccagcgtgatggcggtaaacaactcccaggcgtgggccgagtaatcgagcaatttacccgcctgcgccgccatatccaccagaccgatagtcgaggcgatggccgagtttttcaccaggttcatcatctcggaggtcatcggcgggacgataacgcgataagcattaggcagcagtacgtagcggtaagcctgcggtagcgtcagacccatcgccagcgcggcatttttttgcccacgcggcagcgactgaatagcggcgcgtacctgttcgcaaacacgggcggcggtaaacagccccaggcagagcatggatgaaaggaaaaattgaatattagggtccagctcggccttaaaccacatgccgattttctctggcagcagctccgggatcaccaggtaccaggtaaagaattgcacaatcaacggcacgttgcggaacagttcgacatacaacgtacccagaccggagagaaaacggtttggaacggtacgtaaaatgccgaaaaatgaaccgacgaggaaagcgataatccaggcgcagatcgacaaagcgatcgtcacctgaaagccactccagatccaaccaagataggtggtgttgccgaacggggcttgttgtaaaaaaataccccagttccagtctatagacataaatctactccagaaaaaagagggtagcagcgttaactgctaccctcgaagattgttacccagcgtattgcggttttctggcccgatggggaacgaccaccaggcgtatagtctgtccgtgctacgtaacaatcgagagggctggaatttccgcccctggttcttgtaattagttcagtgccttgtcattcggttctttgaacagtgctttcatttcgtctgacagttcgaaattcatgttcaggtttttcggcggaattggatttttgaaccacttatcaaaccatttttccgcttcaccggaggtctgcacctgagcgatggtgtcatccatcagctttttgaactgcggatcgtctttacgcaacatgcaaccgtaggcttcctgagactgcggcttgccgacgatttcccagttgtctggtttcttcgctttcgcacgttcaccagccagcagagcatcatccatcataaaggcaacggcacgaccgctttccagggtacggaaagagtcaccgtgatctttggcgctgataattcgcatattcattttttgctcttcattcagtttgttgagcaaaacttcagaggtggtgccggaagtgacgactacggctttgcctttcaggtcggcaaaatctttgatatcgccgccctttttggtcagcaggcgcgtaccgaccacgaaaatagtgtcagagaaagccgcctgtttttggcgttcggcattgttggtggtagaaccgcattcaaaatcgaaagtgccgttttgcagcagtggaatacggttttgtgaggtgatcggaatcaatttcacctgtaagtctggtttgttgagtttctttttcactgcttcaacaatggcgttggagtaatcctgcgagtagcccaccactttttgctgattgtcgtaataagagaaaggtactgaagattcacggtgaccgacgacaatcacgccgtttttggcgattttgtccagcgtgctgcctgctgccggggcggcgtcatctgcctgtgccagtcctgcggaaagcgccagggccaggattgctgtggcaggtttacgtaattgcatatccaactcctttatcttctgcgttaaaaacgcatggatacccgttgtgagtgtttgtgttgttatcatctgcgactttattgtgcagtgttgtgtttgttaggtaacatttagtttggataaatgtaaagatattgctgttttattgtttatttttgcgaggtgcgccgcaccattccgaagcaaaattcttaaaccgcacctttttggtgctaccgctgatttgtggtggtgcaacccgtttgcgttgcggctgatttcattgcttacacagtaaataaagcaacttacatgccaaaaaatacttaggggtgaattaattacgattgtaatttcagtttgaaaaagtcatatttcggacagtgttaacttttcggtgtgggacgtttgccgggatgataactacacacgggaaaatgctttttactagtcttttcaaggaagaatcaccttatgtctgcatcttcggttaagccgttaaatgttcaattacccgcaataaccctgatcctttttgcgctctgtgttgggatattttgttacctcgcacaatggatgagttacgaagaagtcgatcaatccgcactcatccatctcggcgctaacgttgcttctctcacgttgtcggatgaatcctggcgcttattgagcagtgtttttctgcacagtagtttttcccatttgctgatgaatatgtttgcactcctggcggtggggacagtagcggaacggatactggggaaatggcgactcctgattatctggttattctccggcatctttggtgggctgatcagcgcctgttatgcgttacgcgaaagtgagcagatagtcatcagcgttggggcatccggggcaattatgggaatagcgggcgctgcgatagcaacacagcttgcttcaggtgcgggcacacaccataaaaaccagcggcgagtatttcctctgttgggtatggtggcgctgacactgttgtatggtacccggcaaacaggaatagataacgcttgccacattggcggcctgattgcggggggcgcgttgggttggctgagtgcgcgtttagttgggcaaaatcggctcgttacggaaggcgggattgttgttgcggtcactcttcttctgaccgggactatctggtttgtgcagcagcagattgatgaatcagttttacaggtcaggcaaagcctgcgtgaagcgttttatccgcaggagattgaacaagagcgacgacaaaaaaagcagcagttagtggaggagcgcaacgccctcagggaaacattatccgctccggtaagtcgtgagcaggccagtggtgatttactcgctgagattgccgatatccatgatatggcgatcagtcgggatggtaatacgttgtatgccgcaattgaaaacacgaacagcattgttgttttcgacctcggacaaaagaaaatcctgcatacctttacagcgcccatagcgaaagaaaagtcagtcaaacattgtggtggctgtaaagatcagggcgtcagatcgctggcattaagcctggatgaaaagttgatttatgcgacttcatttgaagcgaatgcgttatcggtcattaacgtggcgacgggggagattattcagtcgattaccaccggcgcacatcctgacagctttatcctctcgcgtgatggcacaaaagcctgggtgatgaatcgcaccagtaatagtgtgtcagcgattgatctggtggcttatcagcatgtggcggatatcccgctggagaaatacgacgggacggggatgagcggtaaaccaggcgcctgggttatggcactttccccggatgaaaaaacattactggttccgggagcaggcagaggtaacatcgtgcggatcaataccatcacgcatcagaaagaagactttcccgcaggtaatgcgcgtggtgtcgtttctgcgatgggattccgaccaaaaaatggtgagattatttttgccgatagccaggggatttcacgtataagagctgaggatcaacaagccagcattatgacgcaatggtgtagcaggagcgtttattccgttgagggtattagcccggacggtcagtatttagcgttggtgtcatatggcctgcaaggttatgtcatcctgctcaatattaatgccgggcagattattggcgtttatcctgccagctacgttaataatcttcgtttttcagcggatggtagaaagatatttgttatggcgaagaacgggctaatacaattggacagagaaagttcacttgatccgcaggcaattattcgtcatccccaatatggcgatgtggcttgtatccctgaaccgtaagaaaaaagggcatgataatcatgccccacaactcaatgagaaagtatgttttgttcatgccggatacatcaggcacattaatgtttacgtgctcgcagactcatcagtacagcggcaaaaccaaacagcgccgtcagcacccacagcggccagttgccggttcgtgcgtacggtgtgagtccggtggttggtgtcacgttagtggtcaacacctcgcgggtgaactgcgggatcatcgcctgaatctcaccctgcgggccaatcaccgccgtaatgccgttgttggtgctgcgcaacagtgggcgcgccagctccagcgcacgcattcgcgccatctggaagtgctgccatggaccaatagacttaccaaaccacgcatcgttggagatagtcagcagatagtcggtatccgggcggaagttatcgcgcacttgctcgccgagaatgatttcgtagcaaatggccgcagtaagttgaatgccattcaacgacagcggtggctgaatatatggtccgcggctgaatgaagacatcggcaaatcaaagaacggtgctaacggacgcagtatcgactccagtgggacaaactcgccaaacggcaccagatggtttttgttatagcgatcggctgattcatagctgtacggtgcgcctttacccagtgtgatgatggtgttgtaggtatcgtagcggttctgtttattgagacgcgcgtcgacaatcccggtgaccagcgagctacctttatcgcgcaactcaccgtccagagctttgaggaacggttgctgattaatttccagatcggttatcgccgactccggccagataatcaacgatgatttgcccatcagcggtgccgttgcgttgtagtaaatcttcagcgtattaagtagctggtctccgtcccatttcagcgattgcggaatatcgccctgaaccatcgaaacctgaatagttttttccggttgcggggtaaaccactggatgtaacgcagcgggaagggaagggcaaacagcacgacggccaccaccagcggacgccagttgcgtttgaccaacgccagtgccagcaggccgctaaccatcatcagcaggaagttaatggcttccacgcccattatcggtgccagcccttttaacgggccatcaatctggctatagccgaactgtaaccacgggaagcctgttagtacccaaccgcgcagaaactcggtcacttgccagagagcaggggcggcaatcgccacgcgcagccaggtggttttcggccacagacgcgacagcacgccagcaaacagtccggtatacagcgacaaatacgccgccagcagtaccaccaggaagatgttaaccgggccaggcattccgccaaaggtcgcgatgctgacatagacccagttaataccgctgccaaagaggccaaatccccagcaaaagccaatagcggcagactggagtggacggcggttaaaggtcaacgcctgaagccccatcagcgaaataatcgccgcaggccagacgtcgtaaggagagaaggccagcgttccgcaggcaccgaataataacgccagcagcaggcgaatgcgctggcgttcaattaatgaggcaaaagccatgtagttatctatccagtttcggttttattcatccagcttcggctggggtgagtcatccgggattttgacatgaacctgaataatacgccgactgtcggccatcgccactttgaactggtaaccgtcgatgtcgatggtttcgccacgcgccggaagatgcccaaatgcctgcatcaccagaccaccgatagtgtcaacctcttcatcgctaaagtgggtgccgaacgcttcgttgaagtcttcaatagaagccagtgcgcgcacggtccaggtatgacgactcagctgacggaagtcgatatcatcttcttcgtcatactcgtcttcaatctcaccaacaatcagttccaggatgtcttcaatggtcaccagaccggaaaccccaccgaattcgtcaatgacgatcgccatgtggtaacgctgagagcgaaactctttcagcatccggtctacgcgcttactttcaggaacgacaaccgcctgacgtaacactttgtccatgctgaaggcttcagcatcgctgcgcataaacggcagcaagtctttcgccatcagaatcccttcaatgtgatctttgtcttcgctaatcaccgggaaacgtgagtgggcggactcaatgatgacatcaaggcattcgtccagcgtctggttgcgtttcagggtaatcatctgggagcgggggatcatgatgtcgcgaacgcgttggtctgcgatgtccatcaccccttcgagcatatcgcgcgtatcttcgtcgataaggtcgttctgcccggaatcacggatcagcgccagcagttcgtcacggtttttcggttcaccgtggaaaagttggctgagtaacagggagaaaaatcccttcttgttgcttatcgtgtcactactgtgtgaattgtcgtcgctcatggcgtcgtatgggttctcatgttagttaatcaaaacgccgtcgttaatcaccaacggcggggacgtctgccagtcaaatgcctggcaaattattctttctcggcaatgtacggatcctcatagcccagagcaagcataatctctgtttcgatggcttccatttcttctgcttcgtcatcttcgatgtgatcgtaacctaacaaatgcagactgccgtgcaccaccatatgcgcccagtgcgcctccagtggtttgccttgctcctgagcttccttctcaaccacctgacggcagataaccagatcgcccagtagcgacatttccatgccaggcggtacttcaaacgggaaggagagcacgttggtcggcttatccttaccgcgataggtcagattcagactgtggctttcggcggtatcgaccacgcgaatagtcacttccgattcttcctgaaactgcgggatcaccgcattcagccatgtctgaaactggctctcttccggtaacccggaattatcttcacatgccagttgtaaatcgaggatcacctgactcatttttgttcctgttcttcgcgcttgcgttctgctgccagcgccgctttacgtttttgttcggcttcttcccaggcttcataggcgttaacgatacgcgccaccaccgggtgacgaaccacgtcttcgctgtggaagaagttaaagctgatctcttcgacatcagccagcacttcgatggcatgacgcaaaccagacttggtattacgcggcaggtcgatctgtgtgacgtcgccggtgataaccgcttttgagttaaaaccgatacgggtcaggaacatcttcatctgttcgatggtggtgttctggctttcatcaagaatgataaacgcgtcgttcagcgtacgaccacgcatataggccagcggtgcgacttcaataacgttgcgctcaatcagtttctcgactttctcaaagcccagcatttcaaacagcgcgtcgtacagcgggcgcagatacgggtctactttctggcttaaatcgccaggcaggaagcccagtttctcaccggcttcgaccgccggacgagtcagcagaatacggcgaatttcctgacgctccagggcatcaactgccgcagccactgccaggtaggttttacccgtacccgccgggccaacgccgaaggtaatgtcatggtcgagaatattggcgatgtactgcgcctggtttggcgtgcgcggcttaattacgccgcgtttggtcttgatattgaccgctttgccgtactccggcacgctctccgcgctttgctccagtacccgcgcttctttaatcgcaaggtggatctgttccggttcgatatcctgaatctgaccacgcatcggggcagtatcgacatacaggctacgcagaatgtctgccgcagcggtgacgcaaatcggacggccggtcagtttaaagtggttatcgcggcgattgatctcgatgccgagacggcgttcgagctgcttgatgttgtcatcaaacgggccgcacaggctcaacagacgcgcattgtctgctggctccagggtgatttcgcgagtgtctatgttcaaaccgttcctcttatctgtatgccgccggaagctgaacattcaccggcctataaggaaattattcacgccacaggaaaaaggcgcaagcattgcgataaagatggggataaagagagaaaaaacaaggcccaccggaacggcgggcctgagaattacggctgataataacccacgccaaggtcgttttctttgcgggtacgggcaatcaccgattccggtgtttctgccacgcgcagacccatttcatcttcagttcgcaccactttaccgcgcagagagttcgggtagacgtcggtaatttctacatcgacgaatttaccgatcatatccggtgtgccctcgaagttaaccacgcggttattttcagtgcgaccggaaagctccatgatgctcttacgtgaagtcccttctaccagaatgcgctgggtggtgccgagcatccggcggctccatgccatcgcttgctgattaatgcgctcttgcagaatatacagacgctgcttcttctcttcttccggaacatcatcaaccatatcggcggctggtgtacccggacgtgcagagaagataaagctgtagctcatgtcgaaattgacgtcggcaatcagcttcatcgttttctcgaagtcttcggtggtttcgccagggaagccgacgatgaagtcagagctgatctgaataaccgggcgcgccgcacgcagtttacggatgatcgctttgtactccagcgccgtatgggtacgtcccatcaggttcagaatgcgatcggaaccgctctgtaccggcagatgcaggaagctcaccagctccggcgtgtcgcggtacacttcgatgatatcgtcggtgaattcgatcggatggctggtggtaaagcgaatacgatcgatcccgtcgatcgccgcaaccagacgcagcagatcggcaaacgatccggtggtgccgtcgtagttctcaccgcgccaggcgttcacgttctggccgagcaggttaacttcacgcacgccctgagccgcaagctgggcaatctcaaacagaatatcgtcggacggacggcttacctcttcaccacgggtgtaaggcactacgcagtaggtgcaatatttattgcagccttccatgatggagacaaacgcggtcggcccttcggcgcgcggttccggcagacggtcaaacttctcgatttccgggaagctgatatctacaaccgggctgcggtcgccgcgcacggagttgatcatctccggcaggcggtgcagcgtttgcggcccaaaaataatatcgacatagtgggcgcgctggcgaatgtgctcgccttcttgcgatgccacgcagccgccgacgccgataatcaggtctggattcttctcttttaacagtttccagcgacccaactgatggaagactttttcctgagccttctcgcggattgagcaggtgttcagcagcagcacatccgcttcttccgccacgtcggtcagttgatagccgtgggtggcatccagcagatcggccatcttcgatgaatcgtactcgttcatctgacagccccaggttttaatatggagttttttggtcatcgacttgctcttgcgaaatagtagccaggaatgcagggcgcatagtgtaatgctttgctgccgttgtgaccagtatgagcgttatcagcccttgggggtaaaaatcctgtaaacttaaagcatattgctaacaggattattgaccatgacaaatcaaccaacggaaattgccattgtcggcggaggaatggtcggcggcgcactggcgctgggactggcacagcacgggtttacggtaacggttattgaacatgcccagcctgcgccgtttgttgcggacagccagccggacgtgcggatctcggcgatcagcgcggcttcggtatcattgcttaaaggggtaggggcctgggatgcagtacaggctatgcgttgccatccttaccgcagactggaaacgtgggagtgggaaacggcgcatgtcgtgtttgacgccgctgaacttaagctaccgttgcttggctacatggtggaaaacactgtcctgcaacaggcgttgtggcaggcgctggaagcgcatccgaaagtaacgttacgtgtgccaggctcgctgattgcactgcatcgccataatgatcttcaggagctggaactgaagggcggtgaaacgatcctcgcgaagctggtgattggtgccgacggcgcaaattcgcaggtgcgacagatggcgggaattggcgttcatgcctggcagtatgcgcagtcgtgtatgttaattagcgtacagtgtgagaacgatcccggcgacagcacctggcagcaatttaccccggacggaccgcgtgcgtttctgccgttgtttgataactgggcatcgctggtgtggtatgactctccggcgcgcattcgccagttgcagaatatgaatatggcgcagctacaggcggaaatcgtgaagcatttcccgtcgcgtcttgggtatgtaataccgcttgccgctggcgcgtttccgctgatacgtcgccatgcgttgcagtatgtgcagccggggcttgcgctggtgggcgatgccgcgcataccatccatccgctggcggggcagggggtgaatcttggttatcgtgatgtcgatgccctgattgacgttctggtgaacgcccgcagctacggcgaagcgtgggccagttatcctgtgctcaagcgttaccagatgcggcgtatggcggataacttcatgatgcaaagtggtatggatctgttttatgccggattcagcaataatctgccaccgctgcgttttgtgcgtaatcttggtttgatggcggcggagcgtgctggcgtgttgaaacgtcaggcgctgaaatatgcgttagggttgtagcctcacaacattgctggatgcatgccaaccgtaggtcggataagacgcggcagcgtcgcatccgactttgaaggataagacgagtcaacatcgcattcggcattgaatatacgcagaaaagcaaaaagctcgccgaagcgagcttttttaatgtggctggggtacgaggattcgaacctcggaatgccggaatcagaatccggtgccttaccgcttggcgataccccaactgggtgcacttacaaggtaagcgtcttgaataaattggctggggtacgaggattcgaacctcggaatgccggaatcagaatccggtgccttaccgcttggcgataccccaacaaattggtttttgaatttgccgaacatattcgacacattcagaatttggtggctacgacgggattcgaacctgtgaccccatcattatgagtgatgtgctctaaccaactgagctacgtagccagattgtttcttcgatggctggggtacctggattcgaaccagggaatgccggtatcaaaaaccggtgccttaccgcttggcgataccccaataaccgggcggtgaaccgcttattcgaagaatatggctggggtacctggattcgaaccagggaatgccggtatcaaaaaccggtgccttaccgcttggcgataccccatccgtacaacgctttctggtgaatggtgcgggaggcgagacttgaactcgcacaccttgcggcgccagaacctaaatctggtgcgtctaccaatttcgccactcccgcaaaaaaaagatggtggctacgacgggattcgaacctgtgaccccatcattatgagtgatgtgctctaaccaactgagctacgtagccatcttttttttcgcgataccttatcggcgttgcggggcgcattatgcgtatagagccttgcagcgtcaacctctttttcaaggaaaattgctcgaaagtgactgtttggttaggttgcgaacagcatggcgctatattcgtcaattattgtttactttgtgttttttccccaccctacagccattcttttgtcatacaggatgaaattcggaattcaacaatagtggtgggaaattaatctatgaaatactggcctacagtaatgagttgtcaaacatcgatgtggcaaacccggaacatttccttactgcatatcagaatcaacaagcgccccagtaactgaaattgccccggatttctccggggcaatattacacgtcttatttatatgccgactggtgaacgccaaccgcgcgaccagacggatcgtccattttcttgaacgcttcatcccactcaatcgctttagcggaagaacaagcgacggaaggaccgcccggcacgcactcagcggcgctcggaagcgggaacaattcttcaaagatctcccggtacagatacgcttcttttgaggtcggcgtgttgaacgggaagcggaagcgggcagtttccagctgttgatcagaaacctgctgcgctgccacttctttcagggtgtcgatccaactgtaaccgacgccatcggagaactgctctttttgccgccaggccacgcttgcaggcagatacgcttcaaaacattcacgcaggatgtgtttttccattttgccgttaccgcacattttatcctgtgggttaatgcgcatcgccacatcaaggaattttttgtcgaggaacggaacgcgtgcttccacgccccaggctgacatcgctttgttggcacgcgcgcagtcatacatatgcagggccagcagtttacgcaccgtctcttcatgcaactctttagcgttcggcgctttgtggaagtatagataaccgccaaacacttcgtcagaaccttcaccggacagcaccattttaatgcccatcgccttgatcttacgcgacattaaatacatcggtgttgaagcgcgaatagtggtcacatcataagtttcgatgtggtaaatcacgtcgcggatggcatccagaccttcctgtacagtgaagtgaatttcgtgatgcaccgtgcccagatggtttgccacttcctgggctgctttcagatccggtgagcccggcagacctacagcaaaggagtgcaactgcggccaccaggcttcagagcgttcctgatcttccacgcgacgggcggcgtatttcttggtgatagcggaaataattgaggaatccagaccaccagaaagcagcacaccgtaaggcacatcagacatcagatggcttttaacggaatcttccagtgcctgacgcagctcgtttttgtcggtcacgttatctttcaccgcatcgtagtcgaaccagtcgcgatgataataagaacggatttcgccgtcctgactccacaaatagctccccgccggaaactctttaatcgtgcggcaaactggcacgagggctttcatttctgaggccacatacagctgaccgtgttcgtcatagcccatatacagtgggatgatccccagatggtcgcgaccaatcagatatgcatctttttcgctgtcgtacagggcaaaggcaaacatgccctgcaagtcgtcgagaaattccggccctttttcctgatacagcgcgaggatcacttcacagtcagacccggtctggaactggtaacgatcgccatattcagcgcgcaatgcctggtggttgtagatttcaccgtttactgccagcacatgagttttttgttggttgtagagaggttgcgcccccgcgttaacgtcaacaattgacagacgttcgtgggcgagaatggcgttatcgctggcataaataccggaccagtccgggccacgatgacgcatcaggcgtgacagctcgagtgctttcttacgcagctcaactgcgtctgttttgatatcgaatacgccaaaaatagaacacataaccttctccgttaacctggtgtttactgcgtgttgtgtttgcttgttaaaaaaatgccgcaaagcagcacggtgcgcaagcgatttggcagtggaaaaataaaaaacgtaatggcgattgctgattgatgaaaaaggggagggcttttgggtatatttattgatggatcgataatttttgacgggttttattgaatggggtgattttaatgatgggtaaaaataagaaaccacgccctgaggcgtggttgctattcagataacgtcgatttcagcgaccgatgggtaaatccaacttgggcggaacggcatactgtcgatatcgtcgagtgacgaaacaccagaaagcaccagaatcgtctccagaccggcctggaagcccgccagaatatcggtacgcaagttatcgccgacaatcaccgtttcttccgaatgcgcctgcattttgtttaatgccgcgcggattatccacggactcggcttaccaacatagaacggtttacgtccggagattttctcgatccccgcacacagcgcgccacaggccggataaaaaccgcgcccgtgggtatccgggttggtggcgataaagcgtgcaccgttagcgacgaaataggctgctttatgcatcatgtcccagttgtaggaacgcgtttcgccaacaatcacaaaatcagggttcacatcggtaatagtgaaaccggctttgtacagttcatgaatcagtgcgccttcgcccaccacatacgctttcttgccttcctggcgacgcaggaaatcggcggtcgccatcgcggaggtataaaacacgctatccggtacatcgacaccggcagtggcaaagcgattcgccagatcttgcccggtctgcgaaggatagttggtcagcaacaccagcggcaggcctttatccataatcccgtgcaaaaattccgctgcacccggtacggcgacgttatcgtgcatcagcacgccgtcgatatcgcaaattacatttttaatggtcatggactacccagaatattgacaacaataagcgccactataaaagcacattaattttccagcaaatgctggagcaaaataccgttgagcatggcgcgttttaccagcgcaaaagcgccgattgccgagcggtgatccaactcagaacgtaccaccggtagattagtacgaaacgccttcagcgcctgggtattaatgcagctttcaatagcagggagcagcactttatcggcttcggtgatttctccagcaataacaattttttgcggattaaataagttgatagcaatggcgatggttttacccagatgacgaccgacatattcaatcacttccgaggccaggctatcgcctttgttcgcggctttgcagatagttttgatggtgcagtcgtccagaggcacacggctctggtagccctgctttaacagattcaacacccgttgttcaatggcagcattggcggcgatagtttccaggcagccaaagttgccgcagtggcagcgttcacccagcggttcgacctgaatatggccaatttcaccgacgttgccgttgcgcccgataaaaattcgcccgttagagataatcccggccccggttccgcgatggacacgcaccagaatggagtcttcgcaatcctgacttgcaccgaagtagtgctctgccagcgccagactgcggatatcgtggccgacaaaacaggtcactttaaaacgctcttccagtgcttcaaccagcccccagttttctacctgaatatgcggcatgtaatgaattttgccgctgtccgggtctacaagccctggcaggatcaccgaaatcgcgatcagctcgcgtagcttgcgctggtagctatcaataaactgagcaatggcattcagcagggcatgttccagcgtctgctgggtacgttccgggagcgggtaatgttcttctgccagcactttgctgctgagatcaaacaaggtgatggtggcgtcgtgacgaccaagccgtacgccgattgcgtggaaattgcgggtttcggtgacgatggagatagcgcggcggcccccggtggaggcctgctgatcaacttctttgatcagcccgcgttcgataagctgacgcgtaattttggttacgctggcgggggcaagctgactttgctcggcaatctgaatccgcgagattggcccgtactggtcaatcaggcgataaactgccgcgctgttaagctgttttacgagatcaacattacctatctgagcttgtccgcctggtgtcatactttctcttattgagttacgacctcgttaccgttaacgatggtcctggtgattttaaaatcaggtgtgaatgcagtcaggttggctactttacctgcggcgagcgtgccgagacgtttctctacgccaatcgcacgtgccggatagagcgtcgccatacgcagcacttcatccagtgcgataccacaatgttcgaccagattacgcacgccttcaatcatggttaaggatgaaccgcttaacgtaccgttctcatccacacaaagtccgttacggtagtatattgttttacccgcaaaaatgaactgttcaatgttggcacctgctggcgcggtggcatcggtaaccagacacaatttgtcgcctttcagacgtttagcgttacgaatgttggcgtaatcaacatgcaggccatcagcaataataccgcaataaatgtcagcttcgtcgaggatcgcgcccgccaggcccggttcacgaccggtaatatacggcatcgcgttgtacagatgggtggcaaaggtaatccccgcgcggaaaccggctttcgcttctttcaacgtcgcgttggagtgaccagcagaaaccacaatcccggcatttgccagtttgctgatgacttccgctggaaccatttccggtgccagagtcactttggtaatcacgtcggcgttctcacacaggaaatcgaccagcgcggcatcaggcttacgcacaaaattcggattatgggtgcctttttttaccagattcagccacggaccttccagatgcagacctaacgcctggttcggatgttttgccaggtactcgcgcataacgcgcacgccctgtttcatcagctcatcgctggtggtgataagcgtcggcagatagttagtacagcctgatttctcattggctttctgcatgatttccagcgtttccacgctgaccgcttcagcggtgtcgttaaactgtacgccgccgcagccgtttaactgcacatcgataaaaccgggggagagaatggccccgttcagtgaacgttgttcgatctctggcggcagttccgctaccggacagacgcttttaatcaggccatcagcgataacaaccgcgtggtcatcaagaaattcgtggccggtaaagatccggccctgggttaatgcatacattctgacccccgattttaaaaaataatgccctgagcaaggagccagggcagggataacaattacagacccttgatattttctgcttctaattcattgaaatatcttaaagtcttaactttcagctccatggtggaaggttcatcgcacaccatgatcgcttttggatgcagttgcagacaactgatggtccacatgtggttcacgcaaccttcaacggcggcctgcagtgccagtgctttctgactacccagcaccagaatcatcacttcttcggcatccagcaatgtaccaacaccgacagtcagggcatattttggcacctgattaacatcgttatcaaagaaacgagagttcgcgacgcgagtgtcatgagtcagggttttgatacgagtacgagaagccagagaagacgccggttcgttaaatgcaatatgaccgtcgttacctacaccgcccataaacagatgaatttttccgtaagaacggattttttcttcatactggcggcattcggcttcgatatccggggcgttgccgttgagaaggttgatattttctgctggaatatcaacgtgatcgaagaaattacggtgcataaagctgtagtagctttccggatgctctttcggcagaccgacatattcgtccatgttgaaggtgacaacgtgcttaaagctgacctggcctgctttatgcatttcgactaacgctttataggtggtcatcggcgtgccgccagtcggcaggcccagtacaaacggacgatcggcagtcggtttgaacgcattgatacgattgacgatatggcgagcagcccatttgccgacctgttcagcggtagtcagggggatcagtctcattattcacctcaataagtaaaatgtaagccgttggcggattaggcatctttaagcgtaacctggatttgcgcagacaggcgtcaatccgacctgattttttgaatgataaaataagttttctggtttagccagtaaaagggagtgatgataacgatatttggtgacaaaactcacaaaagacacgcgtttaatttgcgatacgaattaaattttcacacactctgtagcagatgatctaacaatctgattacagaacatcggcagtacaatttgcagcaaaataaaaatacggctttaaacgagccaaatagggttctcgtagggggaataagatgaatattttaggttttttccagcgactcggtagggcgttacagctccctatcgcggtgctgccggtggcggcgctgttgctgcgattcggtcagccagatttacttaacgttgcgtttattgcccaggcgggcggtgcgatttttgataacctcgcattaatcttcgccatcggcgtggcatccagctggtcgaaagacagcgcaggtgcggcggcactggcgggtgcggtaggttactttgtgttaaccaaagcgatggtgaccatcaacccagaaattaacatgggtgtactggcgggtatcattaccggtctggttggtggcgcagcctataaccgttggtccgatattaaactgccggacttcctgagcttcttcggcggcaaacgctttgtgccgatcgccaccggcttcttctgtctggtgctggcggccatttttggttacgtctggccgccggtacagcacgctatccatgcaggcggcgagtggatcgtttctgcgggcgcgctgggttccggtatctttggtttcatcaaccgtctgctgatcccaaccggtctgcatcaggtgctgaacaccatcgcctggttccagattggtgaattcaccaacgcggcgggaacggttttccacggtgatatcaaccgcttctatgccggtgacggcaccgcggggatgttcatgtccggcttcttcccgattatgatgttcggtctgccgggtgctgcgctggcgatgtacttcgcagcaccgaaagagcgtcgtccgatggttggcgggatgctgctttctgttgctgttactgcgttcctgaccggtgtgactgagccgctggaattcctgttcatgttccttgcaccgctgctgtacctcctgcacgcactgctgaccggtatcagcctgtttgtggcaacgttgctgggtatccatgccggcttctctttctctgcgggggctatcgactacgcgttgatgtataatctgccggccgccagccagaacgtctggatgctgctggtgatgggggttgtcttcttcgctatctacttcgtggtgttcagtttggttatccgcatgttcaacctgaaaacgccgggtcgtgaagataaagaagacgagatcgttactgaagaggctaacagcaatactgaagaaggtctcaatcaactggcaaccaactatattgctgcggttggcggtactgacaacctgaaagccattgacgcctgtattactcgtctgcgccttaccgtggttgactcagctcgcgtcaacgatgcgatgtgtaaacgtctgggtgcttctggggtagtgaaactgaacaaacagactattcaggtgattgttggcgcgaaagcagaatccatcggcgatgcgatgaagaaagtcgttgcccgtggtccggtagccgctgcgtcagctgaagcaactccggcaactgccgctcctgtagcaaaaccgcaggctgtaccaaacgcggtatctatcgcggagctggtatcgccgattaccggggatgttgtggcactggatcaggttcctgacgaagcattcgccagcaaagcggtgggtgacggtgtggcggtgaaaccgacagataaaatcgtcgtatcaccagccgcaggaacaatcgtgaaaatcttcaacaccaaccacgcattctgtctggaaaccgaaaaaggcgcggagatcgtcgtccatatgggtatcgacaccgtagcgctggaaggtaaaggctttaaacgtctggtggaagagggcgcgcaggtaagcgcagggcaaccgattctggaaatggatctggattacctgaacgctaacgctcgctcgatgattagcccggtggtttgcagcaatatcgacgatttcagcggccttatcattaaagctcagggccatgttgtggcgggtcaaacaccgctgtatgaaatcaaaaagtaatctgctttatgtctgatgcgacgcggcagcgtcgcatccaacaataaaaagcggcagggatcttctctgccgctttttttgtctgagattacattgggaagataaaaacagcgcctgcacaaagcgccagaatgcggatgagatacattggtacagagaacacccagaattcgggaagtttgtatttccccattccgaggatcatggctggcattccgtcaataggcatatagccgccattccagccagaaatcaccaccgcaatcgcggcagcggtcgggttaagcccaaggctagtacaggcggcaatggcgatgggggcaaaaatatatactgaccccatattcgaacccgtgaaggtggcgcaggtactggtaagcaaagcaaaggcgacaataaatacaaacggtgagacgccagaaccgagcacacctgcaacggcatcgccaaccatcgccgtaaagccggtgcccgccagtgcatcagctacaccgatcacccccgccatcattaaaatgaccggagcccccatatgatcgcgaacttctttgaagtccagtacatcgatcatcagaacaaacgcacccgcaagacccggaataacgaaggcgatatttcccagaatgttcattagcatcatgccgataacgctgacagcgaatgcggcaatagtgcaatattctttccaggcaggaagggcgttaaacgtttcctcgcgtgccgccagcgcatcctcggaagcatccgcaatgggatgatccggaagaaaacggtaggcaataagactccatgcgaggaaagccgctgacatgatgagattcaccagcgcaaagcgccccatcgaaatctcttgatgaaaccccgcggtttcgagtacggtcgccgtaacgccaaagagaagcgcgagattgataggaagaagcgggtggttggtggcaaatcccaggggcatcattaatttcgatgttggtagctttttactgtacggaatggtggataccagcgacagaattagcacgtaataaccggtcgctccggtgccggcaagactggcacccagcataacaatgactaacaacagcccatagctgcggtaactgcctttattgaccaggcttatcatcgcagatttaacgttgctgataagccgggttttttgtagcgccgccatgaccaccataaaccctgcaatcatcaccacgcttggattgacgaatccggcaaaagcctgttgaacggtcgaaagtcccgatacaaccagcaataaacacgcaagcagtggcggtgcgccaaaaggcattttgtccgacatgatcagcacgatcatcaggaccagtattcctaatgccaggatcatttccattgtcattttttctctccttttaggcttccagcatgtcgcgcggtactttaaagaccgctttgcgtattgaagtagccgtgccaattgcgcacagcgcctggtgaggttcctcaggcataaagacggcgaaatcaccggcgtgtagggtgatggcgacactgttttcaggggatggggcgataaacagatcgggcttacgttcttcatcgttttcgcgagcgatgggccgcgttcccgcattaatgccctcacaaccagtaatcaccacctgtatatcggcccatagatggtgatactccgtatggcggagttcggcgggttgcgtgtctgaagttcccagcgtgcagaaccaccgacatccttcaggttgccagcgaccgtcctctctggtggataacgccgataacgaacactccgggcgcagcagaatatttctcacccaggcaggaagccccgccagcgacaaatggttgagattaccgataatcatgatgcctgccccttaacccactcgggggagatgcgtacgtacttgatggcctgacgccaccaggtgtaagcgatatgtagcgtaccgtccgggctttgtttgatgctggggtaggagaactcacgatttagcttttccagggaattgttggtcatgcagtagccgtcgccttcatcgagattgcgccgccacggccagcttttcccaccatcggcagaaatcgctaccgtcatcggcgcgcgtggggccccccagaaagcggagcgtccgacggctgtcggttctttgcggctgtcgtcgccatcgtcgatttcgtcataaagcgacgcgcgacgttctactgcgcctgccgcactcatcgcgttgtacaccagcgccagttcgccgctggcaagtgtcgttacctgaatagacgaattgttgttgggcaattcggttgcttgcggtactgaccagctctcgccgttgtccgcggaatggctgatatagatgttgtctgcccaacggctgcgaaagagagcaaccaacgtaccgttgtgcagcattgtgatattcatatgaacacagccaagactttgcggcacctcgacatcgcgccaggagtgaccaccgtcagcggaaattttcactgcgctgatatcatcattgccgacccatttttcgccgggttgggtacggcaataaaagacgggcagcagccagttgccgttatcaagcaccgtgattggctgtcgaatgaacgtaccgggtttatcaagcagggtggcaatctcgccccaggtttgtccgaggtcgtctgacttacggtagcggacgatggcggtgtcctgattaccggatatttgtgcggtccataggagccacagcacgttatccggcgcgagaaacagcaccgggttttgctctgaacgcgtgtcatcgtgggaaagtttgaccgcatcgctccactgcattccgccagcgggcaatcgcgatccccagacagaaatatcggcaataccttcctgcgttcccgcaaaccagacgcacattaacgcgccatccggcaaaggcagaatattcgccgcgtggttttgcgggcaggacgagggcagcatggcggtaagcacatgcgaatcgttttcggatggacggatgacgccgtcacgaataagggctacagacatagttagactccatcttaaagttggtaatagatttattaatgcgagtgcgattcatgcgtttcgagcaatgtcgaaacttttttattttttctttcacggataatattgagtgtctcaacacttaatgagaaaaatatcgcgaagtagagatactctttggcaatatgaatgttgagactatcggcaaccagcaatacaccgacaaacaataaaaaggttaacgccagtatttttattgacggcgtggcgttaacgaaatcaccaattgttttcgccgcaaacatcatgacaccgacggcaatcattacggcggcaatcatgataaatatatgctgagaaaggccgacggcggtgatcaccgaatccaggctaaacacgatatcgagcagcattatctgtacaatggcaccgcacaacgacagttgccgcgatccgctgccatgttcgtcttcctgcgcgggcgacagctcttcgcgtatctcctgtatcgctttataaatcaggaacagcccgcccccgagcagaatcaaggtgcggaacgaaatctccagcgtcagcacggtaaaaagcggctgggtaatatgtgaaagccacgcaatggatatcagcaataatatccgcataatcatcgcgcagcttaaacccagtttacgcgccatattttgttgtgataacggaagttttgccaccaccagtgaaagaaaaataatattatccaccccaagaataatttccagaaaggtgagggtaattaaagtgagccagatatctggctgcataaaccacaaaaacatggggtaatcctttattctctttatctaaactttatagcgggctggataatagagttaatttaattaatgttataatgacgaataatttgttgaatctcgctgatctgttcaggcgtgaaattaaccgcgtagcggctatcaccaacatcatgccccataagctgcaacgcttttttcaccgcagccggggagaatgctactttataaagatcggtacgcaggcccgttacactctcctgtgcttcataagacccttcaatatcaccggcatggaagcgagaccagatggcattgatttctcgcggcgcgatgttggcgagcccagagatacaggttgaacatccctcgacaaaccctttatggatcagcgaatccgggccgttgagcacattaaagccgtcaatgtcgcgcaccgcatcgagaaaacccttcaggctttcgtcgcttccggcgctgtctttaatcccaatgatattggggtgcgacgccagagcacgcgcggtttctggctggatcgtattgccagtgcgggccgggatgttatagagaaacatcggaatgctcagtgcgtcggcaattgcgctgtaatgcgcaatcaactcttcctgtttcagcggtacgaagtaaggggcaatgaccgacacggcatctacgccaagtttttcaatctgctgacccagacgaatcgtttcgcgcgtagagatctcgccaatgtgtgccacgaccggcgcacgaccagccacttcatccacgcaggtttgcgtaacgctgagcttctcctgttcattcaacacaaaaaactcgccgttggtgccgccgcaaaaaatcgcgttacccgcttccagttgacgattcacctgcacttttaacgccgggatattcagactgccggtcgcggtaaacggggtgacaatggcggttaatacaccttcaatggttttcggcatgatttactccttaaatggatgttgcggaaacagtgtttggtaaatggcctgtacgtcctgtagatcaatttggcacggcacattgttcataaggcgcttcacgttcagtgccgcctcgctcagagaggcaatatcctctggcggtacgccgagagccgcgagattgttgggtagcttgagttgattgactaatgcctgtaaccaggtcaccagggcatgagatttttcttccgcgctcagggcggtttccgcatcgggaatgcaatcccagacccgggcaaatttctcgaccgcccaggggcgaacaaacgccatgcacggcgccagcaagatggcattcgcgacgccatgcggcagatgatatttgccacctaacgggtaggagagcgcatgaacgagatgcgtgcccgcatgggttatcgctacgccgccatagtaagacgcccacagcatttccagttttgcgcgcagatcctgaggatcgttcacggcgggttgaatgtgccggaaaagtttacttaacccagtcagcgccgcgttatcgctgaccggatttgccacggtcgcggtaaaacactccagtaagtggcaaagagcatcaatgcccgtggacgccgcaatatgcgcgggcatgctggtggtcagttccgggaaaagcgccacatagtctggtaacagcacctgggaaataatacccaccttcgtgctttgctcagggattgccagaatcgcattcggcgtggcttctgagccggttccggcggttgtaggaatcaaccatgattgcacccgctgagtcggtttttcacccgcaagcagcgcatccagccccggtgattgtggatggcaaagcaccgatagcagcttcgccacatccaacacgctgccaccgccgatcccgaccaccacatcaaaagaggcatcgccaggggcatccattagctggcgcacatcatgatgcgtgggctctgcgggcacattatcgataacgttaacctgcgggcagtgcttttccagtaaggcgcgaatctgctgcacaccgtcgagctgcgcaatattacggtcagtgaccagcagcatttttctgatgtcgggtaagagcgacgtcagggaagggatagcgcctgcgccgctcagtatcgtgctattgataattaccacaaataacctctcttctgttgattgaattcaatcattcaaaatgccgtagcctacgtaatatggtctaattttataatttattcgagtgattaataacttgagcttgctcacatttaatcaattgtgattgaatataatcattgttatcataaaacaacctggagtgatgatggaaaagggaatcactaagccgagcattctcgtcgttgccgatgatttcacgggagccaacgacgcgggggtaagcctggcgcaggtggggcatacagttgatgtggcctttgaaatgcattatcgcggtgatgccagcgtatgggtgattaacagcgacagtcgggcgatggatcctaagctggcggcgatgaaaataacctcgctgatgagtcatctccctctggcgaataatccgccgctcgtgattaaaaagatagattccacgctgcgaggcaatatcggcgcagaaattgaagccctgatgaaggcatgcggtataacgggcgcagtggttgcccccgcatttcctcaggcgggaaggaccacagtggccggtgagtgttgggtaaacggtgtgcggataacggaaaccgagtttgccagcgatccgaaaaccccggtattgagcgcccgaattgcggacatcatccggttgcagacggccattccatgccagcccgttacggtttctcagctcagccatttgtcttatgagcaaccgtggattagcgtgatagatgcgcagacggacagcgacctggatcgcatcgctgccgctgtgatgcaggctaaacaaccgctgctgctggtcggctccgctggtatttgtgatgccgttgcccggcgctccgcgattatgccgccacccaccgtgctggccattattggttcaatgagcgaaatcgctcaacggcagatcgccacacttcattcacacccatgtatcacacagatatacgtcgatgttgaacacattctggcaggcaatgccagtgactatgacgcgcgtattgtgcaggccttgcagaaaggcgaccactgcattgtccacacctgtaacgattctgtagcaaggcatcagatcgacaccctttgccagcgttggcagatgagtcgcgctgcacttggggaaaaaatttgtcggtttcttggcgaacttacccggcaagttctgcttcgcacaatgcccgatgcgctttatctctctggtggtgatgtcgcaatggcaacagccagtgcgttaggcgcgaccggatttcgtattacggggaaggtggcgcaatgcgttccatacggtcactttctgggcggtgtctggtcccgttcggtgatgacgaaagccggtgggtttggcgatgaaaccacgttgcatcaggttctgaattttatcgaggagaagtgtagtgaataatattattgcggtaacgatgggtgacccggcgggtattggcccggagatcattattaaatccctgagcgaagccgggcttgctggtgccccggtggtggtggtgggctgtgtgcgcacgctgcgacgtattatggcgatgaatatcacgccgcaggcagagttacgcgtcattcaaaaggtgtgcgacgcccattttgctcccggcgtgattaacgtgatggatgagccgctggctaaccccgatgcgctgacacccggagtggtacaggctgcggcaggcgatttagcgtatcgctgtatcaaacgtgcaacggctctggccttatcaggcgaggtgaaagccatagccactgcgccgctgaataaagaagcgctgcatcttggcgggcataactatccggggcatacggaattgctggcccatcttaccggcagcaaagagtacgcgatggtgctctataccgataagctcaaggttatccatatttcgactcacatctcactgcgtaaattcctggataccttgaatggtgaaagggtcaaaacggttattcgtgttgcgaaccacttcctgaaacgtgttggtattgaacgtccgcgtattgccgtggcgggtgtaaatccacatgcaggggaacatggtttattcggcactgaggaaatcgagattatcgcgcctgcgattgaagcaatgcaggccgaagatattgatgttactggcccgtgcccgccagataccgtgtttatgcaatgccatgaagggctattcgatatggtagtggctatgtaccacgatcaggggcatatccctttaaaactgcttggattttatgatggggtgaatatcaccgccgggttgccatttattcgcacttctgccgaccacggcaccgcgtttgatattgcctggacaggaaaagccaagtctgagagcatggcagtttccatccagttagcaatgcagatttcgcgagaataaaatgaagggatataaccggttagagcagatcatggattacctgaaaagccataatctggtcaccgttgatgagctggtggcggtaaccaatgcgtcgccggctacgattcgtcgagacctgataaaactcgatgagcagggtgttatcagccgtacacatggcggtgtgaccctcaaccggtttattcctacccaaccgactacccatgagaaaatgcagcgcagcctggcggaaaaacatgccatcgccagcgcagcggcgtcaatggtcaaagcgggggattccgtcgtccttgatgccggtacgacaatgattgaacttgcgcggcagattacacatttaccgcttcgcgtgatcaccagcgacctgcatatcgcgctttttttggctgaattcaagcaaattgaagtgacgattatcggcggacgtatcgacgactccagccagtcctgcattggcgaacatggtcgtaaattgctgcaaaatacctggccggacgtggcatttttaagctgtaacagctgggatcttgaaaagggtattacagcacccacggaagagaaagccgcactaaaacgcgatcttatcgcgcatgcttcgcgcaaaattctcctggctgacagctcaaaatacggttcatggtcgctgtttaatatcgcgcatcttaatgaactgacagagattattacggatagtcagcttgatgggcagacgcgtagaacgcttgcgtccttgtcgacgcgtttaatcatagccgactaatctatgactctgcggccagctcatccggcaatttaataaatgcgtcaggctggcgacgtttggccttacgtttccagcgcgaggatctgctggcagtagcgcagaaaacgccccaatatcttacgcaaaaccattttttcgctaactaacagttgtcagcctgtcccgcttataagatcatacgccgttatacgttgtttacgctttgaggaatccacgatgagtgaggcagaagcccgcccgactaactttattcgtcagatcatcgatgaagatctggccagtggtaagcacaccacagtacacacccgtttcccgccggagccgaatggctatctgcatattggccatgcgaaatctatctgcctgaacttcgggatcgcccaggactataaaggccagtgcaacctgcgtttcgacgacactaacccggtaaaagaagatatcgagtatgtcgattcgatcaaaaacgacgtagagtggttaggtttccactggtctggtaacgtccgttactcctccgattattttgatcagctccacgcctatgcgatcgaactgatcaataaaggcctggcgtacgttgatgaactgacgccggaacagatccgcgaataccgcggcaccttgacgcagccgggtaaaaacagcccgtaccgcgatcgcagcgttgaagagaacctggcgctgttcgagaaaatgcgtaccggcggttttgaagaaggtaaagcctgcctgcgtgcgaagatcgacatggcttcgccgtttatcgtgatgcgcgatccggtgctgtaccgcattaagtttgctgaacaccaccagactggcaacaagtggtgcatctacccgatgtacgatttcacccactgcatcagcgatgcgctggaaggtattacgcactctctgtgtacgcttgagttccaggacaaccgccgtctgtacgactgggtactggacaacatcaccattcctgttcacccgcgccagtacgaattctcgcgcctgaatctggaatacactgtgatgtccaagcgtaagctgaacctgctggtgaccgacaagcacgttgaaggctgggatgacccgcgtatgccgaccatttctggtctgcgtcgtcgtggttacactgcggcttctattcgtgagttctgcaaacgcattggtgtgaccaagcaggacaacaccattgagatggcgtcactggaatcctgcatccgtgaagatctcaacgaaaatgcgccgcgcgcaatggcggttatcgatccggtgaaactggttatcgaaaactaccagggcgaaggcgaaatggttaccatgccgaaccatccgaataaaccggaaatgggcagccgtcaggtgccatttagcggtgagatttggatcgatcgcgccgatttccgcgaagaagctaacaagcagtacaaacgtctggtgctgggtaaagaagtgcgtctgcgtaatgcttacgtcattaaggcagaacgcgtggagaaagatgccgaaggcaatatcaccaccatcttctgtacttatgacgccgacaccttaagcaaagatccggcagatggtcgtaaagtcaaaggtgttattcactgggtgagcgcggcacatgcgctgccggttgaaatccgtttgtatgaccgtctgttcagcgtgccgaaccctggtgctgcggatgatttcctgtcggtgattaacccggaatcgctggtgatcaaacagggctttgctgaaccgtcgctgaaagatgcggttgcgggtaaagcattccagtttgagcgtgaaggttacttctgcctcgacagccgccattctacggcggaaaaaccggtatttaaccgcaccgttgggctgcgtgatacctgggcgaaagtaggcgagtaagtttacgttgtcggatagagcgtttacgccgcatccggcaagaaatatgcaaattatcccaaacgccgcgctctgcggcggctttttttctgcttttcttcgcgaattaattccgcttcgcaatttatccataaaataaatttaaaatcacaaaacataattaaataaaatgtaaccgctttcatcttgctggaatttcacgtttttattcttctgcaagcctttcaactgcaaacttaagccttgtaacaaaaatcatcaaaatatgtgcggttgctcatgttcttacattctggttacagaaagagattgataattcgcgtcgcgaaaaatagtctgttcctgtagtcagcgagacttttctcaacgctacttttttaatttttatttttttcgctgttcacctttggtgcagcaatttatacgtcaaagaggattaacccatgcgtgcgtttagtggcaaacgtagtacgctggcgctggctatcgccggtgttacagcaatgtcgggctttatggcaatgccggaggctcgcgccgaaggattcatcgacgattcaaccttaaccggcggtatctattactggcagcgtgaacgcgaccgtaaagatgttaccgacggcgacaaatacaaaaccaacctttctcactccacctggaatgccaacctcgattttcagtccggttatgctgctgatatgttcggccttgatattgctgcgtttacggcgattgaaatggcggaaaacggcgacagctctcacccgaacgaaatcgcgttttcaaaaagtaataaagcctatgacgaagactggtccggcgataaaagcggtataagcctgtataaagcagcggccaaatttaaatacggtccggtttgggcgagggcaggttacattcagccaactggtcaaacgctgttagcgccgcactggagctttatgccgggtacttatcagggggcggaagccggggcgaattttgattacggcgatgctggtgcgttgagtttctcctacatgtggaccaacgaatacaaagcaccgtggcatctggaaatggatgagttttatcagaacgataaaaccaccaaagttgattatctgcactccatcggtgcgaaatacgacttcaaaaataacttcgtactggaagcagcatttggtcaggcggaagggtatatcgatcaatattttgccaaagccagctacaaatttgatatcgccggtagcccgttaaccaccagctaccagttctatggcacgcgcgataaagttgacgatcgcagcgtcaacgatctttatgacggcaccgcctggctgcaagcattgacctttggttaccgggcggctgacgtagtggatttgcgcctcgaaggcacctgggttaaggctgacggtcagcagggatacttcctgcaacgtatgactccaacctacgcttcttccaacggccgcctggatatctggtgggataaccgttccgacttcaacgctaacggcgaaaaagcggtcttcttcggtgcgatgtatgacctgaaaaactggaatcttccaggcttcgccatcggcgcttcctacgtttacgcatgggatgcaaaacctgcgacctggcagagcaatccggatgcgtactacgacaaaaaccggactattgaagagtctgcctacagcctggatgcggtctacaccattcaggacggtcgcgccaaaggcacgatgttcaaactgcacttcaccgaatacgacaaccactccgacatcccaagctggggcggtggttacggcaacattttccaggatgagcgcgacgtgaaattcatggtaatcgcaccattcaccatcttctgatgcccgacgcggcaggttttgtgcctgccgcacgtttgaggaatttgctatgaaaaaactgattctcatcgccatgatggcatcggggctggtagcttgtgcgcaatcaaccgcaccgcaggaagacagtcgtctgaaagaggcttacagcgcctgtatcaacaccgcgcaaggttcgccggaaaaaattgaagcctgccagagcgtgttaaacgtgctgaagaaagagaaacaacatcagcagtttgccgagcaggaaagtgtccgcgtactggattatcagcagtgtattcaggcaacgcaaaccggaaatgatcaggcggtgaaagccgattgtgataaggtctggcaggaaattcgcagtaataacaaataagtgagagctgtaactctcgcttttcttatttcccttgtataaaaaagccaacctgcaggttggcttttctcgttcaggctggcttatttgccttcgtgcgcgtgctcatcttcgcggcaatcgccttcggcacagtgaccgtaaagatagagactgtggttagtcaggcgaatgccatgttttgcggcgatttcacgctgacgcgcttcgatggaatcatcactaaattcgataaccttaccgcagtcgaggcagatcaggtgatcgtggtgatgttgctgtgtcagttcaaatacggatttaccgccttcaaaattgtggcgggtgacgataccagcgtcgtcaaactggttcagtacgcgatataccgtagccagaccaatttcttcacccatatcgatcagacgtttgtataaatcttccgcactgacgtgatggttgtccggctcctgaagaacttccaggattttcaagcgaggaagcgttactttcaggccagctttctttagggcggtattgttatcagtcatgcggaatctgtcctgttactaagcggttcacttcattagaagaagtgacagaatttgctcttgagataatgcgtatcattatagaattgccacgcctaaatgaaaaccacaagtccctggcaaatattgttaataaaaacgtggcacagcttacatttacaacagcaaggccacttgaacactgggacattgtacaggtacaacagcaaaagttacaaatttgtagcaattattttgattggcattatctattaatacggcgtagacatgagtctacgccgcatcacatcaggcattgagaatttcgtcgagatgcagctcttcagaaatttgtttaacccatttttctacacgttcagcggtcagttccggctgacgatcttcgtcgatagccagaccgacaaagtggtcatcatcagccagaccttttgacgcttcgaagtggtagcccgcggttggccagtgaccaacgatagttgcgccgcgcggttcaatgatgtcgcggatggtgcccaatgcatcgcagaagtattctgcgtaatcttcctggtcgccacaaccaaacagcgcaaccagtttaccattaaaatcaatctcttcgagagtcgggaagaagtcatcccagtcacactgcgcttcgccgtaataccaggttgggatgcccagcagcagaatgtcatatgcttccagatcttctttgctgctttttgcaatgtcatggacatcggcaacgtctttaccaagctgtttttgaatcatttttgcgatattttcggtattaccggtgtcgctgccgaaaaagatgccagtgatagccatgagtgaaataacctcttgaaacttattgaaatgggggtggaaaattgcccacggataaaggcaatcatagcagaacaggcagtcttgcggaatcagcaaacgagcaggactgcacactgtgctacatgaaagtggaaatttaaacgatgccctgactacgcagcgccgccagttgctgcattaacatctcttcgatcagctcgctacggctcatattgcgcgattccgccagctcgttcagtgcctcgacagcttccgcgttcagcttcagttcgacacgcttaaggccacgtactttgtcgcgttttagttggttgcgtttattaatacgcagctgctcatcgcgcgaaagcggattagttttcggtcgtcccggtcgacgctcgtgcgcgaacagatctaatgtcgtacggtccgtttgttctttggccatgatcttggtgacttcgggggaaacaatcagccaggcgcctgcccggatggatagcgcgccataatacatcagcgcgatgagtcacgccaacgtccacgcgcggaaagcgacgcggacgctgggtttttaatcagttgcgttaatcattgagatagcgacggatagcgcgtaataccgcatccggtttttcagcatgaacccagtgacccgcgcctgcaatcacatgagcccgagcctgtggaaattgtgccagtaaatcatcacggtactgctcgctaacatacggagaattgccgccagggataaatagggtaggatgatcccatgccgggattttctcccaacccacaatatgcggatactgatcccacaatactggcacgttaaagcgccactccccatcaacaaaagatttcaacagaaactgaatcaccccttcttcattaagatgctggcgcattattgccgctgcttgctggcgtgtttgtgcgtctgattcactgactgcgttgatggccgcgaaaatctcatcatgacggcgaacgtgataatcgaccggcgcaatatcaatcgccaccagcttgtcaatgcgatcgggggctagtgcagtaagagccattaccgctttaccacccatggagtgaccgataaatgttgctttgtcgatctgctgtgcatccagggtatcaacaagatcctgcgccatcgccgggtaattcattaccggatctctcggtgaaagaccgtggttacgcatatcaacctggatgatattgtgatcgtttaccagatcgcgagccagtacgccaaggttgtcgaggctgccaaatagaccatggacaagaacgatgggagaattattgtgctggttttgtgcagtttgcgcgcggatattcaatttcatggcaaagttctttttttcgcgttgtcgggttagggtattatgttgaccattgtgccacagggctgcaacaaataaggtttattccgagtttttctgcaagccaggcttgacgctatccgctgccgggatttattcatatactcctggcgacttgtattcagctaagacactgcactggattaagatgaaaacgattgaagttgatgatgaactctacagctatattgccagccacactaagcatatcggcgagagcgcatccgacattttacggcgtatgttgaaattttccgccgcatcacagcctgctgctccggtgacgaaagaggttcgcgttgcgtcacctgctatcgtcgaagcgaagccggtcaaaacgattaaagacaaggttcgcgcaatgcgtgaacttctgctttcggacgaatacgcagagcaaaagcgagcggtcaatcgctttatgctgctgttgtctacactatattctcttgacgcccaggcgtttgccgaagcaacggaatcgttgcacggtcgtacacgcgtttactttgcggcagatgaacaaacgctgctgaaaaatggtaatcagaccaagccgaaacatgtgcctggtacgccgtattgggtgatcaccaacaccaacaccggccgtaaatgcagcatgatcgaacacatcatgcagtcgatgcaattcccggcggaattgattgagaaggtttgcggaactatctaaaacgttgcagacaaaggacaaagcaatggcaatccacaatcgtgcaggccaacctgcacaacagagtgatttgattaacgtcgcccaactgacggcgcaatattatgtactgaaaccagaagcagggaatgcggagcacgcggtgaaattcggtacttccggtcaccgtggcagtgcagcgcgccacagctttaacgagccgcacattctggcgatcgctcaggcaattgctgaagaacgtgcgaaaaacggcatcactggcccttgctatgtgggtaaagatactcacgccctgtccgagcctgcgttcatttccgtactggaagtgctggcagcgaacggcgttgatgtcattgtgcaggaaaacaatggcttcactccgacacctgccatttccaatgccattctggttcacaataaaaaaggtggcccgctggcagacggtatcgtgattacaccgtcccataacccgccggaagatggtggtatcaagtacaatccgccaaatggtggcccggctgataccaacgtcactaaagtggtggaagacagagccaacgcactgctggctgatggcctgaaaggcgtgaagcgtatctccctcgacgaagcgatggcatccggtcatgtgaaagagcaggatctggtgcagccgtttgtggaagggctggccgatatcgttgatatggcggcgattcagaaagcgggcctgacgctgggcgttgatccgctgggtggttccggtatcgaatactggaagcgcattggcgagtattacaacctcaacctgaccatcgttaacgatcaggtcgatcaaaccttccgctttatgcacctcgataaagacggtgcgatccgtatggactgctcctccgagtgtgcgatggcgggcctgctggcactgcgtgataagttcgatctggcgtttgctaacgacccggattatgaccgtcacggtatcgtcactccggcaggtttgatgaatccgaaccactacctggcggtggcgatcaactacctgttccagcatcgtccgcagtggggcaaagatgttgctgtcggtaaaacgctggtttcatctgcgatgatcgaccgtgtggtcaatgatttgggccgtaagctggtagaagtaccggtaggtttcaaatggtttgttgatggtttgttcgatggcagcttcggctttggcggcgaagagagtgcaggcgcttccttcctgcgtttcgacggcacgccgtggtccaccgataaagacggcatcattatgtgtctgctggcggcggaaatcaccgctgtcaccggtaagaacccgcaggaacactataacgaactggcaaaacgctttggtgcgccgagctataaccgtttgcaggcagcagcgacttccgcacaaaaagcggcgttgtctaagctgtctccggaaatggtgagcgcctgcaccctggcaggtgacccgatcaccgcgcgtctgacggcggcaccgggtaatggcgcttctatcggcggtctgaaagtgatgactgacaacggctggttcgccgcgcgtccgtcaggcacggaagacgcatataagatctactgcgaaagcttccttggtgaagaacatcgcaagcagattgagaaagaagcggttgagattgttagcgaagttctgaaaaacgcgtaaacatatcaaataagaaaaagggcggtcggaagatcgcccttttttgctttgcttaattaaccgtgtttatttttcagttcaaagcgtggtgagaccagaccatacagtgtccaaccgaggaaggtcacgatggaaccgtatagcatggcttcttccccggatgagtacagcgcataaaagctgtacatcgcgccaacaaaagcaacaaagtttgcaactttcgcttttgaggggggcacattagcgaccttctgaataatgactaatgccgccattgacagaatatacggaatgatattggtcaccacggccaggttaaccagcacgttgaactgactgtttagcgacgggctaatcgtcatcagcgccaacccgctctggataatcacaatggtcaacattccctgcaccggtgcatccactttggttacacgggagaaaattttagggaagtagccttcatcagatgaagatttaaacacctgggcaatggtgaactgccagccaagcagcgaaccgcagcaggacatcaccatcagcgccataatgactttacccacttccggcgtgaacatctgcgcgaaggccagaccaaatggtgccgttgaatttgccagctccatatttggcacaatcccggcaatcacgttggtggagacgatataaatcaccgccgcacctaacgtaccgccgagtaccgcgattggcacattacgttccgggttttccactacatcagtattcgcacacgcagactccagaccaagaaaagcccacagcgtcatagcgatggaagaacctaccgcactgaagaacggtgcatgatgcggattccaggaatcaacgtaaagtgtcgggctaaaccagaaccagccgataatgcacaggcctaccaccggaataatgaccccccacacggtaatgctactgatttgcccggtaatgcgcgcaccaccaaagttagccacggtacaaatccacagcaccccgatggtcgcaagaccaatctgcactggcgacaaactcgcgccgagcagttcggtgccgtaaccaaccgccgaaatagcaatcgcgacgttagcaatcagcagcgagacgccgtaggtatagttcgccataaagttaccggatttaccgaaagcatactcggcataaccgcccatacctcctgatttacggctgaacataccgcattttgcgaatgcccatgccagtgccattgagcctacggctgtcaccagccaggagataattgagattgtcccgacttcggcaagctttgtcggcagcatgatgataccggagcccatcatgttgaccatcgtcagtatggttaactgaacgacacccattttgttcgatttcgcctgactcataatttttcccctttcaacagggtgctttgcgcatcacgaggcttgatgacatagcaccaaacttgcttacgaccatcatgttcttcgatatagacaccctgcagctccggtgcaaaacctggcagcaggttgatgccttcttccagagcgctgaagtaacgcaaaacagcaccaccccagatttcaccaggaacaacacacagcacacccggaggataaggaagcgcaccttcggcagcgatacggccttctgcatccggcagacgaaccagctccacttcaccgcgtaagtaggcgtagttggcttcttgcggattcatgctgacgcgagggaagtgttccttacggaacatctctttttgcagttgtttcacgttgtgacgggcatacaaatcatgcatttcctggcacaactgacgcagggtataaccggcgtagcgctcttcatgctgtttgtagatggaaggcagtacttccgccagaggcgcatcagcttccagtagtttttcgaagcgtaccagcagggcaacaagttgctgcagtttggccatatcttctgccggagtcagcaggaagaggatggagttaagatcgcatttttccggcactacgccattttcgcgcaggaagttagcaagaatcgttgcaggtacaccgaacgcttcatattcgccgttacgtgcatcaatacctggagttgtcagcaacagtttgcacggatcgacaaagtattggttctctgcgtagccttcaaaagaatgccagtgctcaccgggtacaaatttaaagaagcgcagatcaaccgcaatttgcgctgtttcatacgactgccagggtttaccatccaccagttcaggaacgaacgggcgaatgtgctggcagttatcgaggatcaatttgcgggcattaataccgttaaccacacaatccatccacatattacgaccgctgacaccttcatgcattttggcgttgatatccagtgcggcaaacagcggatagaacgggctggtggaggcgtgcatcataaaggcgttgttcatgcgtttgtgcggtacataacgctgttgccctttgatatggctgtcttttttatgaatttgtgaagtctgagaaaaaccagcctgttgtttatgcacagattgcgtaaccagaatacccggatcgttctcattaagctccagcagcagcggcgaacagtccgccatcatcggaataaactgttcatagccgacccatgctgagtcaaacaggatgtagtcacacagatgaccgattttatccaccacctggcgggcgttataaatagtaccgtcgtaggtgcctaactgaatcacagcgaggcggaacggacgcgcttcttttgcccgttgcggtgcaacttctgtaatcagttcacgcagataactttcttcgaagcagtgcgcatcaatgccaccgataaaaccatacgggttacgtgctgtttccagataaaccggtgttgcaccagcctgtagcaaggccccgtgatggttagacttatggttattgcggtcaaacagcaccagatcacccggtgtcagcagggcgtttaaaaccactttgttggaggaggaggtgccgtttaaaacaaagtacgttttatcggcattaaacactttagccgcatgttgctgtgcaatgcatggcgcaccttcatgaatcagaagatcacccattgcaacgtcggcattacacaagtcggagcggaagagcatttcgccaaaatattccacgaactgattgcctgccggatggcgacggaaaaactcacctccctgatgacccgggcagtcaaaagcgctattgccctgattgacataatcgaccagtgcgcggaagaagggcgggcgcagttgcgtttcataatggctggcagcggtttctaactgacgtccataaaactctttccgtgattcgcaatgctcgaagacaccagaaatacgtggcagatattctgctggtacacgttcttcattttccgttgcaataaaaacaggaatgccatagccagtagcgtctatttcatcgagttttccacgttcaacatcattgactgataaaataatagcggcaacgtcaatataattacttttgtcaatattcacgcattcacgatgagtggaaaagcaatccgggcaagaacggctaacggcaatttttaattctgacattttgttcatctctttatttcaggtaatagcaggtcctcaatttctcaaaggagaaattgatcacgccggaaaaaagcaaaaccccaccgctgataaataaatcagtagtttgctttttgcagatgcaataacccagaccagcccggtaactggctatactcgtcatacttcaagttgcatgtgctgcgactcgaattatttagagtttgaaagggttagcagtatatgagcaccgagggatacaggtattaacctgtaatgcttaaagtcagggagacctgtacgcaggggtgccctttagtcagaagactagcgggcattaaagaaatgaaagtcaaaactattacgatgggcaaacttcatgatatgggttgtccgccttatatgaggcattaagcggttattattttccatttacctttacctttttctgtgtcagttgaaggtagggttattctatccatgaaatagctataatctgtgaagaagatcaacaaaaaacgatcatatcccaaataataaatcattaatgatgaatagcgccatattagatgctgttttgttgtttaaatgttgcaattttgtgggttgtattttcattaagaaattaaacctgccaaataataattttcggggcaggtttaataataaattaataattatttaagcgtatttattgaataataattcatggcataaaccgatacccaataccggtttcagtaataaaatggcggggacgggcgggatcttgctccagtttttgtcgcagatgccccatataaatacgcaaatagtggctgtgttcgaccgcgtttggtccccacacctgattgagtaactggcgctgggtgagcacttttccggcgttgttgagcagcacggccagcaggcggaactcaatcggtgtgagatgcacctcttcctcgccgcggtggataacgcgggcggctaaatcgacggtaacatcagaaaatttcaccagcggatcgggcgtggtggtggcggagtggcggcgtaatgcgacgcgcagacgggcctgcaattcgccaatgccaaacggcttactcagataatcatccgctccggcatccagcgcggcgattttatcgctctcttcgctgcgtgcggaaagcacaatcaccggcaccgcgctccactggcgcaggtcgcggataaactcaatcccatcaccgtcgggcaggccgagatcgagaataatcaaatctggcttacgggttgccgcttccagcaagccgcgttgcagcgtttcggcctcaaagacgcgcataccgtcgccctccagcgccgtgcgcagaaagcgacgaatagcctgttcatcttcaacaatcagaacgtttgtcacatatcctcatgaaattcttcaagttcaggggctgtttgctggggaagtgtaacacgaaaacaggcaccaccttccggtcggttgaatgcggtaatggtgccgccgtgtacatccactatcgcccgacaaattgccaacccaagccctacacccggtaccgccgactctttattcccgcgagcaaacttatcaaatatcgtctgctcctggcctggtggaagaccggggccgttatcccagacatccagttgtagattttcgccctcaacgtgggcattgataccaatttcggcctgcgcccccgcatatttcaccgcgttctctagcaggttaatcagcacccgttcaaagagtggcccgtcaacgtggattaaggtcagcggctctggcagagaaagattgatgggcgacgataaacccggttccagcatttgcagcgcgctgccgaccacttcttccagcgttaaccactctttcttcaaattaaagccgccggactgaattcgcgccatatccagtagattattcaccagtcgggtggtgttcagcacatgctgacgaatctcgctggcctggcgggcgtggggcgatccttcgcttgccagatcgagcgttaagatttctgcctgaccgaacagcaccgtaagcggcgtgcgtaaatcatgcgaaagcgccgccagcagggcgttgcggatctgttcacgttcgcttgccatccgcgcctgttcttcgctggcggttagtgtcagtcgctcaagggcattggcgactaacagcgtaaacgtctccagcaggcgctgctgttccgggatcatcaactggcgcagattccccggttccaccaccaccagtccgtaggttttctcgccgctttttagcggcaaaatctggtacggtacaccgggtaacgtgtcggtgcccgcgcccgcaggcaggcctttatcaaaactccactgcgcgatggcatcgtcccacggcgtcattccttgcggatgtgttaaaggctgcaatttaccgttgtcatcaggcagcaacacctggctacgggcatgaaacgtggaggcaataaactgttcgctggtggcggcgatatcctgcgaactacggcccacagccagagctttggacatttcatataagtgccgtgtgcgttgttcgcggtaacgggctacccgcgcctgataacgcacgccagcagtaaggttcccgatcaccagcccgacggttaacatcaccgcgaaggtcagcagatattgcacatcagagacggcgagcgtgccgcgtggggcgataaaaaagagatcgaaactcaccacattaatgacggtggcaaccaccgaaggccagcgtccgtaaaatagtgccaccaccacgacgccaagcagatacagcatcaccaggttggcggcatcaaacgccatcagccactgcatggcaattaaggtgataacggcgcataacgcggcggcaaccacgcatccctgaatctgtacccgccacttgtctttaaaagagcggctatccggcgcgttgttaatcgtgcgggcgggtggttcatcaagcgcgaccagcacctgatcgagatcgggggcgatgcgtgccagccggtcagcaaatgtttcccgacgccaccagcggcgcgaagccgggcgaccgagaataatcttgccgagattatgttcacgggcataacgcactaccgctttctcttccgctggatcagaaagtgttgccgtctccgcgcccagctcctgcgccagacgtaaggcgctgagaattgcccgacgttttttctccggtaagcgatgcagggcaggggtttcaacatacaccgcgtgccagacactgcccaggcgcgaggccaaccgcgccgccgtgcggaccagtttctcactgccggtgttatgcccgatgcataaaaggatcgcgtcgcgtgtgtgccagactttctcttcgccaggatgcccccgccaggcgcgcatttgctcatctacgcgatcggcagtacggcgcagtgccagttcgcgcagggcgatcagattacctttgcggaaaaaatgttcaatggcgcgctccgcctgcccggcaatatagactttgccttctttcagtcgctggcgcagatcgtccgggggcaagtccaccagtactacgtcgtcggcggcatcaaaaaaaggatcgggcacggtctcccgtacctgaattccggtgacgccgctgaccacatcattcagactttccagatgctgaacgttgacggtagtgaaaacatcaatgccagcttccagcagctcttcgatgtcctgccagcgtttaggatgacgtgaacctggcgcattactgtgcgccagttcgtccattaagatcagtgccggacggcgggcgagggcggcatcgagatcaaactcgctgatgtgccgcccacggtacgcctggcgttttaacggcagaacagccagacctttcagcatggcggcggtatctttccgaccgtgggtttctaccacgccaaccacaatatccagcccttgcgcccgcagtcgctgggcttccgccagcatcgcccaggtcttcccgacgcctgcgcaggcaccgaagaatactttcagcttcccccgatgcggcgcggcagcttgttccagcagacgatcggggtcgggacgtaagggttcgttattcatcaagcttatccagtgccagattgagttcgacaatgttgacgaccggctggccgatatatttcaccagcggttgttggctgtattttgcgatcagttgcgtgagctgttcaacgctgagattacgcgctttcgccacgcgtgggatctgccaggccgccgcttgcggggtgatgttattgtccagcccgcttgctgacgccgtcaccagttcaaccggaacgttcgtgctggcatccgggttagcagcccgtaatgcggcaacgcgtgcggctatctgtttatccagctccgggttactgactgccagattgctcccgccagaagcctgtggattatagggcatttctgctgttgccgacgggcgaccatgaaaatagccgttgccggtaaaattttgcccgattaatgccgaaccgcgcaccgtatcaccttcacgaatcaatgaaccgttggcctgccagggaaaccaccattgccccagtgcggtggtcagcagcgggtaaacgccgccagtaatcaataacagaaagagaaatgtcgataatgccggacgtaatccacgcatggtaaacctcacaccagaccgcaaacggttagcagtaaatcaatgactttgataccaataaacggcaccagcagcccacccagaccgtaaatccataagttacggcgcaacatggcagaagcggtaagcggtttataactcacgccttttaacgccaggggaatcaaaaagacgataatcaaggcgttgaaaatgaccgcactgagaatggcggagtcgggcgaatgcaggcgcatgatgttcagcgcatttaactgcggatacgttgccgcgaacgccgctggaataatggcgaagtatttcgccacatcgttggcaatgctgaaggtggtcaacgagccacgggtcatcagcatctgtttgccaatgtgcactacctcgatcaacttggtcgggttggagtcgagatccaccatattgcccgcttctttcgccgcctgggtgccggagttcatcgccaccgcaacatcggcctgtgccagcgccggagcatcgttggtgccatcgccggtcatcgccactaaacggccttccgcctgatactgacgaatcagtgccagcttggcctccggtgttgcttcggcgagaaaatcatcgacacccgcttccgcagctatcgcggcggcagtcaggcggttatcgccggtaatcatcaccgttttaatgcccattttacgcagctgggcgaagcgctctttaataccgcctttgacgatatctttcagcgcaataacgcccagcacacgagaaccttccaccaccaccagcggcgtggctccctgacgcgcaacctgatcgactttttgatcaacatcggcagggaagtgaccgccgttagcctcaacatggcggcgaatggcatcgacagaacctttacggatcatgcggttgtcgatgttgatcccgctcatccggctttgtgcagtaaacggtacaaaggtggcatggagcgactgcacatcgcgctcgcgcaggttaaaacgctgcttggcgaggatcacaatactgcggccttccggcgtttcatcagccagcgaagccagttgtgcggcgtcggccagcgctttttcctccacgccttgtgcggggataaactctgacgcctgacggttaccgagggtgatggtgccggttttatccagcagcagaacgtcaacatcacccgctgcttcaactgctcgcccgctggtggcaataacattcgcgcccagcatccgactcatcccggcgacgccaatcgctgacaacaggccgccaatagtggttgggatcagacagaccagcagtgccaccagtaccgttacgctgactgcattaccgccccacgcggaaaacggccacagcgtggcggttgccagtaaaaagacgatagtcagggcaatcaggagaatggtcagggcaatctcgttcggcgttttacgtcgctgcgcaccttccaccatcgcgatcatccgatccagaaatgtctcgccggggttaacgctgcactcaatcaccagccagtcagaaagaatacgcgtgccgccagtgacggaggcaaaatcaccgccggattcacggatcaccggtgctgattccccggtgatggcgctttcatcgaccgatgcgccgccttcaatgacttcaccatcgcaggggataatatcgccagcttctaccagcacgatgtcacctttacgcagttgatcagcaggaactttgtccgccgcagcgccatatttcggttcgcgcagtttgcgagcaaaagcggtttttttcacccctttcagactgttggcctgcgctttactgcggccttctgccaacgcctcggcgaaattagcgaacagtacggtgacccacagccagccgctaattgccgcgctaaacagcgcattgccaggcatcacaccgcttgccatcgcgatgctaatacaggtggtcagcagacttccgatccagacgataaacatcaccggattgcgccattgcgcctgcgggtttaattttttcaccgcttctttcagcgcctgaacgacaagtgttggttcgaatagcgccagttgtttacgactcatattcagtgctcactcaatatcatcaggagagatattccgccaccggaccaagcgccagggcagggataaaggtcagtgcgccaaccagcaacacggtgccgattaacaggccaacaaacagcgggccgtgcgttggcaatgtgccggagctggcgggttggctctttttactcaccagcgaaccggcaattgccatcaccgggataatcaccccgaagcgcccgacaaacatgcacaacgccagtaaacagttccagaatggagagttggcgcttaatccggcaaaggcgctgccgttgttgttagcggcggatgacacggcgtacagcacttcgctaaaaccatgcgggccagggttgagcatggcgctacgtccggcgtcggtcatcattgccagcgccgcgcccatcagcaccagcgtcggggtgaccagaatcgccagtgcagtcagtttcatctcgcgtacgtcgatttttttacccagatattccggtgtacgaccaatcatcagcccggcaataaacaccgccagcaggacaaacagcatcatgccgtaaaggccggaaccgacgccgccgaataccacttcaccaatttgcatcaaccacatcggcaccatgccaccaagagcggtaaacgaatcatgcatcgcaatcaccgcgccgcaggaagccgccgtagtcacgaccgcaaacaggctactgaccagcacgccgaaacggctctctttaccttccatattgatgctgctgtccgcgccgagcgccagcagatgcggattaccctgaacttctgcccacatcactacgcctgtgcagatgacaaaaatcaccgacatcgcccacagcaacatgcgcccctggcgacgatcgcccgccacttcaccaaaggcaaagcacagcgctgttgggatcaagaaaatcgccagcatttgcacgaagttggtcagtgcggttgggttttcaaacggatgcgacgagttggcattaaaaaagccaccgccgttagttccgagcattttgatcgcttcctgagaagctactggccccattggtaacagctgttgcgatccttcaatggtcgtcacagcctgataaggcaaaaagttttgcagcgcaccttgttgtataaaaaacagtgcgatcaacaatgccacaggggctaacacccataacgtgatgcgtagcagatcgacccaggcattaccgagcgtgctcatgctctggcgggtaaacgcgcgaataagcgcaaaaatcaccgcaatcccgctggcggcagaaagaaagttttgcaccgttaagcccgccatctggctgaaatagctcaacgtggtttcaccgctataagattgccagttggtgttagtgacaaagctgacggcggtattgagcgccagatcccacgacagccccggcaactgctgtggattaagcggcagatagtgctgaccgagcaacataaaaaacagcaccgccagccccagtatattcaggccaagaatggctgagagatactgcttccagttcatctcgcggtcagagacgccaagcgcgctaaagagtacgcgttcaacgcccgtcgtaccaggaagaggtatatcattaatcagccgcgccagcccgctacctaagggacgcgccagcaccattaataccagtaaaaacgtggcaatcagtaagaacccttgcgcagccatcagaacgcctccgcattgatcagggcataaaccagataacccagtaataaaaacaccagcaacacgccggctatcacgcctgcactcacagtgcacctccagtggcctaaaagtgataccggaagggtagagttctggctgcaaagatttcgcaaaaatctgcgggcggggtgtaaaaaaagtataaaaatggcaaaagccatgatttaactaatgtttagtattaatttaacttttatgtaacttaattacacagtgaatgtaaataaaccatcaataagcaaaaataagtggtcggatgagtagtaaaattacacaaacagcggtactattttcatcagataaacgaattcatttttccggtgctattcaccgggtagatacaaaagggggagaaaagtatggaactctacaaagaatatcctgcatggcttatctttttacgccgtacttgtgcggttgcagcgggcgttctggcgctgcctttcatgcttttctggaaagaccgcgcccgcttttatagctacctgcaccgcgtctggtcgaaaaccagcgataaaccggtgtggatggatcaggccgaaaaggcaaccggtgatttttactgattgccaaacatgacgtttaaagaaaaccgccggtggaaacgctggcggttttcttttttcggcgtctacacttactcctgtaaaccgttcaggagcagtaatgaatcaacaactttttgatgacagcacccttatccgcatttttgctttgcatgagttacacaatctcaaagatcgaggactaacgcgcggggcgcttctcgattatcacagccgctataaactcgtctttctggcacattctcagccggagtaccgcaaacttggcccgtttgtggctgatattcaccggtggcaaagtctggatgactattacaaccagtaccgccaacgcgtaattgttttgctttctcaccctgccaaccggcgtgatcatactaacgttttgatgcacgctcagggatattttcgcccacatattgattccacagaacgccagcagctggcggcgcttatcgacagttatcgccgtggcgagcaaccgcttcttgcgccgctgatgcgtatcaaacactatatggcgctttatcctgacgcctggctttcagggcagcgttatttcgaactttggccgcgtgtgattaacttgcgccatgcaggagttttatgactacccatctggtctggtttcgccaggatttacgtcagcacgataatctcgcgctggctgccgcctgccgcaattcgtctgcgcgcgtgctggcgttgtatatcgctacaccacgccagtgggcggcgcataatgtgtcgccgcgtcaggctgaacttatcaatacacaacttaatgcgctacaaatcgcgctggcggaaaaaggcattcctttattgttccgtgaagtggatgactttgccgccagcgtcgaaatagttaaacaggtgtgcgcggaataccgcgttactcatcttttttataactatcagtatgaggtgaatgagcgggcgcgggatgtgcaggctgagaggacgctgcgtaacgtggtgtgtgaaggatttgatgacagcgtgatcctgccgccgggggcggtgatgactggcaatcatgagatgtacaaagtctttacgccttttaaaaacgcatggttgaaacggctgcgggaagggatgccggagtgcgtcgctgcaccaaaagttcgtagtagcggatcgatagagcccgcgccatccattacgctgaattatcctcgtcagtctttcgatactgcgcatttcccggtggaagaaaaagcggcgattgcgcaattacgccagttttgcctgaacggtgccggagagtatgagcaacaacgagattttccggcagtggaaggcaccagtcgtttgtccgccagcctggcaacgggcgggttatcgcctcgccagtgtttacatcgcctgttggcggaacaaccgcaggtgctggaaggcggaccggggagcgtctggcttaatgagctgatatggcgcgagttctaccgccatttgatgacgtattatccttcgctgtgtaaacatcgtccgtttattgcctggacggatcgtgtacagtggcaaagcaatcccgcccatttaaaggcctggcaggagggcaaaacgggatacccgattgtcgatgctgccatgcgtcagcttaacagcactggctggatgcataaccggctacggatgattacagccagttttctggtgaaagatttgttgatcgactggcgcgaaggcgagcgatatttcatgtcgcagttgattgatggtgatttggcagctaataacggtggctggcagtgggctgcttctacgggtactgatgcagcgccgtattttcgtattttcaacccgacaactcagggcgagaaatttgaccgcgaaggcgaatttatccgccagtggctaccggagctgcgcgatgtaccggggaaagcggtgcatgagccgtggaagtgggcagagaaaacaggtgtgacgttggattatccgcaaccgatagtcgatcacaaagaggcaaggctgcgaacgctggcagcgtacgaagaagcgaggaaaggagcctgataaaacgcagcgagcgttttatcaggcatggtgctggcttattaagactccagcgccagcgcgcggtttctgaacttaagcgcctgatacagccaaatcatcagtaccagtcctacacacgccagtgcgccccaggtaatttgatcaaatacttcaatatatgcattgatggagtagttgatcgccccggaagcatcaaacgaagcctgcgacgtctgatcggcaatcacgcccgccagatagttcgcaatcgcgccggaaagcagcatataaatgccggttaatacgccggtcacgccggggatttcaatgcgcgtaatctgcgacatagcaaccggatcgataaacagttccgcaaagcccatcaccgccaggcctaacaccatcagtggcagagaagagtgaccatacattgcggaccagcgggcgcttaaggtcagaatgcagaatccggcgctcatcaggccaaggccaagagcaaattttccccagatgcgcacggtacgattacctgcgacgctttctttaaccacccacgccaggaacacaccgcacagcataactgcgaaggcattaatcgactggaacatagcagtcggaacggtataaccaaacatatcgcggttaacgaagcggtcgatataaaggctaatcgagctacccccctgttgtgcgaatgcccagaacaacatgctgaagaaggtgagggtaacaatcagccccagctccttacgctgtttttggttttctgctttgcgataaatttttgccagaaccccaaggccaatgatcgtcgcgacaatcaaggcgtataccgaccactctttccagaacaacacggtaatcagcgcaggcgttgccaccagcagaaccagtagccatccccagttgggcaggagaaagtttgtcgcacgcagtacctttttgttaacgccgcgggtatgtgtgaaatgacgattgccacataagaaaatgaccagacccgcgatcatacccaccgccgccaggccaaagcccatcgcccaactgtactcttcctgggcgaaaccacaggcgataggtgcgataatagaccccacgttacccgccgcatacatcagcgagaaaccgccatcacgacgtggatcggttggctcatacagctcgccgagcaggcaactgacgttggatttaaacagaccatagccgcagacgataatcgccagggacagatagaggaatgacggatggatctcactggcacccagcaccacatgaccgatcgccatcaacaacgcccccagcatcaccgccatgcgattgccgagaactttatccgccaaaaagccaccgaggattggcgtgacatataccagcgaacagtaggcgctaaataactcgtaggcgtgattatcgctatattttagttgattggtgagatagaggatcagcagggcacgcatgccgtaaaagctaaaatattcccagatttgcagcgcaacgacatagtaaatagcgcgcggttgtgatgcgtgtttattcataataattccacaattgactgcaacgtcacgtaatagttgcgcggcgtgcttgtgtttccttaaagttaaaactttgatacagatctgattatttatgcaatatgctgtctgattgcataaatatacattagctgaagcgtgatgatataaacaatttgcgtcttttggcgtcgggtttgtttcttaatatgtcaaaagattggctatcgacgaacaggcgaggtaacgctatgttaacggtgtagctatcagaatacggaaggcgcgaagatgaaaaacaccgaactggaacaactgattaacgaaaaactgaacagcgcggcgattagtgattacgcgccgaatggtttgcaggtggaaggcaaagagacggtgcaaaaaattgttaccggtgtcactgccagccaggctttgctcgatgaggcagtgcgtctgggcgcggatgcggtcattgtgcatcatggctacttctggaaaggcgaatctccggtcattcgcggaatgaagcgtaaccgtttaaaaacgttgctggcgaatgatatcaacctgtatggctggcatctgcccctggacgcgcatccggagctgggtaataacgcacaactggcggcgttactggggatcacggtcatgggcgaaattgagccgttggtgccgtggggcgaactgaccatgcctgtgccgggactggaactggcctcctggattgaagcgcgtctgggacgtaagccgttatggtgtggcgataccgggcctgaggtggtccagcgcgtcgcctggtgcacggggggcgggcaaagttttatcgatagcgccgcgcgttttggcgtggatgcttttattactggcgaagtttctgaacagaccattcattcagcccgtgagcagggattgcatttttatgctgcgggtcaccatgccactgaacgcggtggtattcgcgcattgagcgagtggctgaatgaaaataccgatcttgatgtgacctttattgatattcctaatcctgcataacgaataatcagagggatcgaaagtgcaacgagcgcgttgttatctgataggtgaaacggcggtagtactggaactggaaccgccggtgacgctggctagccagaaacggatctggcgactggcacagcgtctggtggatatgccgaatgtggttgaagccattcctggcatgaacaatatcacagtgattttgcgtaatcctgagtcgctggcgctggatgccatagagcgtttgcaacgctggtgggaggagagtgaggcgctggagccggagtctcgctttattgaaattccggtggtttacggtggcgcagccggaccggatttggcggtggtcgcggcgcattgtggattgagcgaaaaacaggttgttgaattgcactcctccgtggaatacgtggtctggtttttaggttttcaaccgggcttcccgtatctcgggagtttgccggaacaactacacacgccacggcgcgcagaaccgcgcttgcacgttccggcaggttctgttgggatcggcgggccgcagaccggtgtttatccgctggcaacgccgggtggctggcagttggttggtcatacctcactcagcctgtttgatccggagcgtgacgaacccatcttattacgtccgggagacagcgtgcgctttgtaccccagaaggagggagtatgctgaagattattcgtgcgggcatgtacaccaccgtgcaggatggcggccgtcacggctttcgtcagtctggtatcagccactgtggcgcactggatatgcctgcgctgcgcattgctaacctgctggtgggtaatgacgccaacgcccccgcgctggagatcacgctcggtcagttaacggttgagttcgaaactgatgggtggtttgccctgacgggtgccggttgcgaagcgcggctggatgataacgccgtctggaccggctggcgattgccaatgagagcaggccagcgtttaacgcttaaacgcccgcagcacgggatgcgcagttatcttgcggtcgcgggtggtattgatgttccgccggtaatgggatcatgcagcaccgatctcaaagtggggattggcgggttggaaggccgtttactgagggatggtgaccgactcccgattggcaaagcgaagcgtgattttatggaagcgcagggcgttaaacagctgctgtggggcaaccgcattcgcgccttgccggggccggaatatcatgagttcgatcgcgcctcgcaggatgcattctggcgttcgccctggcagcttagctcgcaaagtaaccgcatgggctatcgcttacaggggcaaattttaaaacgcaccaccgatcgcgaactgttatctcacggtttgttaccaggtgtggtgcaggtgccgcataacgggcagcccattgtgttgatgaacgatgcgcaaaccaccggtggttacccgcgtattgcctgtatcattgaggctgatatgtaccatctggcgcaaattccgctcggtcagccgattcattttgtccagtgttcactggaagaggcactgaaagcacggcaagatcaacaacgttatttcgaacaattagcgtggcggctgcacaatgaaaattgacctgaacgccgatctgggcgaaggctgcgccagcgacgcagaactattaacgctggtttcctctgccaatattgcctgtggatttcatgcaggcgatgcgcaaaccatgcaggcttgcgtgcgtgaagcaataaaaaatggtgtcgcgattggcgctcacccgagttttcccgacagggaaaattttggtcgcagcgccatgcagctgccgccagaaaccgttttcgcccagacgctgtatcaaattggcgcgctggcagcgattacccgtgcgcaaggtggcgtaatgtgtcatgtcaaaccgcacggcatgttatacaaccaggcggcgaaagaggcacaactggcagacgctatcgccagagcggtatacgcttgcgatccggcattgattctcgtcgggctggcaggaagcgagctgattcgtgcaggcgaacgatatggcctggtaacgcgcgaggaagtgtttgccgatcgtggttatcaggcagacggttcgctggtgccgcgaagccagccaggcgcgttgattgaaaacgaagaacaggcgctggcgcaaacgttggagatggtgcaacacggcagagtcaaaagtatcaccggcgaatgggcaatggtcacggcgcaaacggtctgcctacatggcgatggcgagcacgcactggcgttcgcccgccgattacgagctacatttgctgaaaaggggatagttgtcgcagcataaccccgcttaataaagaatgaaaaaaggatatcaccatgcctgaaggcccggagatccgccgtgcagcggataacctggaggcggcgatcaaaggcaaaccactaactgatgtctggtttgccttcccgcagttaaaatcttatcaatcacgacttatcggtcaacacgttacccatgtggaaacgcgtggtaaggcgttgttaactcatttttccaacgacttaacgctctacagccataatcagctttacggcgtctggcgcgtggttgataccggcgaagagccgcagaccacgcgagtactgcgggtaaaactgcaaacggctgacaaaaccattctgctttatagcgcctcggatattgagatgttgactccggaacaactgaccacgcatccgtttttacaacgcgttggtcccgatgtgctggatccgaatctgacgccggaggtggtaaaggaacgattattgtcgccgcgctttcgtaaccgccagtttgctggattactgctcgatcaggcgtttctggcaggacttggcaattatttgcgggtggagatcctctggcaggttgggttgaccggaaatcataaagcgaaagatctcaatgcggcgcaactggatgcactcgcacacgcgttactggatattccgcgactttcttacgctacgcggggccaggtggatgaaaacaaatatcatggggcgctgtttcgctttaaggtttttcatcgtgatggcgaaccgtgcgaacgctgtggcggcatcattgagaaaaccacgctgtcatcgcgcccgttttactggtgccctggctgccagcactaggccgaacgcttcggcgcataggttgaaataaaccgtgcgatggcaggccccgtcagcaaaatactgaacaggcgcagggtttgcatcgccatgatgagcgccatatcggcattgctccctgcggcgatgaccgccacggtatcaagcccgccggggctggtggcgaggtaggcggtcataaaatcaatatgcataaaccgggtcagcccccacgccatacccgcacaaatagccagcagagcaaaaatcgacagcaggatttgcggtagcgggcgcaatgcccgcagtaatatttgcttatcgaaaccaagaccaatccgccagccaattgccatatatgccatcgccagcagccattccgggagttcgatggtgatgagctgaccagactggagcactgcgcccgccagcatcgggatgagcatcgtgccggaaggaagacgtagcaagcatcccgccgtaccggcaacgaccgcgagcaaaatcgtaagcaggagattaatgctcactggcgggaaccagacgatctgctggttaaccgcttcagcgttatcgcccagcatcatgcgggtgaccagaacagcggctcctgcgacgaacagcactcgcagatattgcataaacgccaccagacgaatatctgcgccgtaatcttgcgccattgcgaccattgccgccgcgccgccaggagaagaaccccaggccccggtatttcctggcagcgagctatagcgcaccaataaccaacccacgatggcgctggaaagcagcgtcaccagtaaaatcgcaagcacgatcggccagttgacggccagcgtggtgagaatcgaaccagtgaggttttgtgcaatcatgcagccaagaatggcttgggcagcgagaaaagcggagcggggaagttgcagagtgactccgcgcatactgaagatgatccccgcgatcatcgggccaagcaggagtgccgccgggagatgtaaagcgaggaagccaatagaaaggagaagtgacagaacacataacattccccactgcaatacaggcattcttcgcttcctcattattttatctttggtgtatcgatacagcataaagaaagctgggtctggaaaaaataacggtaatcaaggaaaaggggaaaatcagcaataatctgaatacgttgccctttccggctgaaaagggcgtcgtgttaaatcagttatagttaatcttaaaaagtaccactgtatcgaagggacccgccgcgatgggagtgccaggtgtggacgataattcagccgtataggttttttcgtagatcagcatatcactggtgaaatcggcgtattaagcatatttattgaatgtataaggcgaggcgttttcatccagtatacgtagcttcagaccattaccaatcaacaatgctttatcttcttcaaccaacgttttttcggtataaaacgaggagctgaccttaaatccgtcggtacactggtcattttgcgattttgttgtcttgatactgaatgttttcgacattgtgtggcggcgaatatccagtaagttaaatttacccaaatcaatcaccagtgtttccggtgaaatattttttcaccattattaatgggtatttgcatctggtttaatttttacaattttttatgttcagccatataaaaagaacccgctctattaaaggcgggtccggaaagtgaacggcttagcaatcaaccattaacgcttgatatcgcttttaaagtcgcgtttttcatatcctgtatacagctgacgcggacgggcaatcttcataccgtcactgtgcatttcgctccagtgggcgatccagccaaccgtacgtgccatagcgaagatcacggtgaacatagaagacggaatacccatcgctttcaggatgataccagagtagaaatcgacgttcgggtacagttttttctcgataaagtacgggtcgttcagcgcgatgttttccagctccatagccacttccagcaggtcatctttggtacccagctctttcagaacttcatggcaggtttcacgcattactgtggcgcgcgggtcgtaatttttgtacacgcggtgaccgaagcccatcaggcggaaagaatcatttttgtctttcgcacgacgaacaaattctggaatgtgtttaacggagctgatttcttccagcattttcagcgccgcttcgttagcaccaccgtgcgcaggtccccacagtgaagcaatacctgctgcgatacaggcaaacgggttcgcacccgaagagccagcggtacgcacggtggaggtggaggcgttctgttcatggtcagcgtgcaggatcagaatacggtccatagcacgttccagaatcggattaacttcatacggttcgcacggcgtggagaacatcatattcaggaagttaccggcgtaggagagatcgttgcgcgggtaaacaaatggctgaccaatggaatacttgtaacacatcgcggccatggtcggcatttttgacagcaggcggaacgcggcaatttcacgatgacgaggattgttaacatccagcgagtcgtgatagaacgctgccagcgcgccggtaataccacacatgactgccattggatgcgagtcgcgacggaaagcatggaacagacgggtaatctgctcgtggatcatagtatgacgggtcaccgtagttttaaattcgtcatactgttcctgagtcggtttttcaccattcagcaggatgtaacaaacttccaggtagttagaatcggtcgccagctgatcgatcgggaaaccgcggtgcagcaaaataccttcatcaccatcaataaaagtaattttagattcgcaggatgcggttgaagtgaagcctgggtcaaaggtgaacacaccttttgaaccgagagtacggatatcaataacatcttgacccagcgtgcctttcagcacatccagttcaacagctgtgtccccgttgagggtgagttttgcttttgtatcagccatttaaggtctccttagcgccttattgcgtaagactgccggaacttaaatttgccttcgcacatcaacctggctttacccgtttgttatttggctcgccgctctgtgaaagaggggaaaacctgggtacagagctctgggcgcttgcaggtaaaggatctattgatgacgaataaatggcgaatcaagtacttagcaatccgaattattaaacttgtctaccactaataactgtcccgaatgaattggtcaatacttccacactgttacataagttaatcttaggtgaaataccgacttcataacttttacgcattatatgcttttcctggtaatgtttgtaacaactttgttgaatgattgtcaaattagatgattaaaaattaaataaatgttgttatcgtgacgcagatcactgttcgggataaaacccgacaaactatatgtaggttaattgtaatgattttgtgaacagcctatactgccgccaggtctccggaacaccctgcaatcccgagccacccagcgttgtaacgtgtcgttttcgcatctggaagcagtgttttgcatgacgcgcagttatagaaaggacgctgtctgacccgcaagcagaccggaggaaggaaatcccgacgtctcctggtaacagaaagttaacctctgtgcccgtagtccccagggaataataagaacagcatgtgggcgttattcatgataagaaatgtgaaaaaacaaagacctgttaatctggacctacagaccatccggttccccgtcacggcgatagcgtccattctccatcgcgtttccggtgtgatcacctttgttgcagtgggcatcctgctgtggcttctgggtaccagcctctcttcccctgaaggtttcgagcaagcttccgcgattatgggcagcttcttcgtcaaatttatcatgtggggcatccttaccgctctggcatatcacgtcgtcgtaggtattcgccacatgatgatggattttggctatctggaagaaacattcgaagcgggtaaacgctccgccaaaatctcctttgttattactgtcgtgctttcacttctcgcaggagtcctcgtatggtaagcaacgcctccgcattaggacgcaatggcgtacatgatttcatcctcgttcgtgctaccgctatcgtcctgacgctctacatcatttatatggtcggttttttcgctaccagtggcgagctgacatatgaagtctggattggtttcttcgcctctgcgttcaccaaagtgttcaccctgctggcgctgttttctatcttgatccatgcctggatcggcatgtggcaggtgttgaccgactacgttaaaccgctggccttgcgcctgatgctgcaactggtgattgtcgttgcactggtggtttacgtgatttatggattcgttgtggtgtggggtgtgtgatgaaattgccagtcagagaatttgatgcagttgtgattggtgctggcggcgcaggtatgcgcgcggcgctgcaaatttcccagagtggccagacctgtgcgctgctctctaaagtcttcccgacccgttcccataccgtttctgcgcaaggtggtattaccgttgcgctgggtaatacccatgaagataactgggaatggcatatgtacgacaccgtaaaagggtcggactatatcggtgaccaggacgcgattgaatatatgtgtaaaaccgggccggaagcgattctggaactggaacatatgggcctgccgttctcgcgtcttgatgatggtcgtatctatcaacgtccgtttggcggtcagtcgaaaaacttcggcggcgagcaggcggcacgtactgcggcggctgccgaccgtaccggtcacgcactgttgcacacgctttatcagcagaacctgaaaaaccacaccaccattttctccgagtggtatgcgctggatctggtgaaaaaccaggatggcgcagtggtcggttgtaccgcactgtgcatcgaaactggtgaagtggtttactttaaagctcgcgcgacagtgctggcgactggcggggcagggcgtatttatcagtccaccaccaacgcccacattaacactggcgacggtgtcggcatggctatccgtgcaggcgtaccggtacaggatatggaaatgtggcagttccacccgaccggtattgccggtgcgggcgtactggtcaccgaaggttgccgtggtgaaggcggttatctgctgaacaaacatggcgaacgctttatggaacgttatgcgccgaacgccaaagacctggcgggccgtgacgtggtggcgcgttccatcatgatcgaaatccgtgaaggccgcggctgtgatggtccgtgggggccacacgcaaaactgaaacttgaccatctggggaaagaagttcttgaatcccgtctgccgggtatccttgaactctcccgcaccttcgctcacgttgatccggtgaaagagccgattccggttatcccaacctgtcactacatgatgggcggtattccgaccaaagtgaccggtcaggcgctgactgtgaatgagaaaggcgaagatgtggttgttccggggctatttgccgttggtgaaatcgcttgtgtatcggtacatggcgctaaccgtctgggcggcaactcgctgctggacctggtcgtatttggtcgtgcggcaggtctgcatctgcaagagtctatcgccgagcagggcgcactgcgcgatgccagcgagtctgatgtagaagcgtctctggatcgcctgaaccgctggaacaataaccgtaacggtgaagatccggtggcgatccgtaaagcactgcaagaatgtatgcagcataacttctcggtcttccgtgaaggtgatgcgatggcgaaagggcttgagcagttgaaagttatccgcgagcgtttgaaaaatgcccgtctggatgacacttcaagtgagttcaatacccagcgcgttgagtgcctggaactggataacctgatggaaacggcgtatgcaacggctgtttctgccaacttccgtaccgaaagccgtggcgcgcatagccgcttcgacttcccggatcgcgatgatgaaaactggctgtgccactccctgtatctgccagagtcggaatccatgacgcgccgaagcgtcaacatggaaccgaaactgcgcccggcattcccgccgaagattcgtacttactaatgcggagacaggaaaatgagactcgagttttcaatttatcgctataacccggatgttgatgatgctccgcgtatgcaggattacaccctggaagcggaagaaggtcgcgacatgatgctgctggatgcgcttattcagctgaaagagaaagatcccagcctgtcgttccgccgctcctgccgtgaaggtgtgtgcggttccgacggtctgaacatgaacggtaagaatggtctggcctgtattaccccgatttcggcactcaaccagccgggcaagaagattgtgattcgcccgctgccaggtttaccggtgatccgcgatttggtggtagacatgggacaattctatgcgcaatatgagaaaattaagccttacctgttgaataatggacaaaatccgccagctcgcgagcatttacagatgccagagcagcgcgaaaaactcgacgggttgtatgaatgtattctctgcgcatgttgttcaacctcttgtccgtctttctggtggaatcccgataagtttatcggcccggcaggcttgttagcggcatatcgtttcctgatcgatagccgtgataccgagactgacagccgcctcgacggtttgagcgatgcattcagtgtattccgctgtcacagcatcatgaactgcgtcagtgtatgtccgaaggggctgaacccgacgcgcgccatcggccatatcaagtcgatgttgttgcaacgtaatgcgtaaacccaggcctgataagacgcgcaagcgtcgcatcaggcaaccagtgccggatgcggcgtgaacgccttatccggcctacaaaagaaatgcagaaaccgtaggcctgataagacgcacaagcgtcgcatcaggcaaccagtgccggatgcggcgtgaacgccttatccggcctacaaaagaaatgcagaaaccgtaggcctgataagacgcgcaagcgtcgcatcaggcaaccagtgccggatgcggcgtgaacgccttatccggcctacaaaagaaatgcagaaaccgtaggcctgataagacgcgcaagcgtcgcatcaggcaaacagcgccggatgcggcgtgaatgccttatccggcctacaaaagaaatgcaggaaatctttaaaaactgcccctgacactaagacagtttttaaaggttccttagcggacgcagaaaacacgacaagtccgcaacaagtgaaccccggcacgcacatcagatatgaaatgtgcgtggtagtatccacggcgaagtaagcataaaaaagatgcttaagggatcacgatgcagaacagcgctttgaaagcctggttggactcttcttacctctctggcgcaaaccagagctggatagaacagctctatgaagacttcttaaccgatcctgactcggttgacgctaactggcgttcgacgttccagcagttacctggtacgggagtcaaaccggatcaattccactctcaaacgcgtgaatatttccgccgcctggcgaaagacgcttcacgttactcttcaacgatctccgaccctgacaccaatgtgaagcaggttaaagtcctgcagctcattaacgcataccgcttccgtggtcaccagcatgcgaatctcgatccgctgggattgtggcagcaagataaagtggccgatctggatccgtctttccacgatctgaccgaagcagacttccaggagaccttcaacgtcggttcatttgccagcggcaaagaaaccatgaaactcggcgagctgctggaagccctcaagcaaacctactgcggcccgattggtgccgagtatatgcacattaccagcaccgaagaaaaacgctggatccaacagcgtatcgagtctggtcgcgcgactttcaatagcgaagagaaaaaacgcttcttaagcgaactgaccgccgctgaaggccttgaacgttacctcggcgcaaaattccctggcgcaaaacgcttctcgctggaaggcggtgacgcgttaatcccgatgcttaaagagatgatccgccacgctggcaacagcggcacccgcgaagtggttctcgggatggcgcaccgtggtcgtctgaacgttctggtgaacgtgctgggtaaaaaaccgcaagacttgttcgacgagtttgccggtaaacataaagaacacctcggcacgggcgacgtgaaataccacttgggcttctcgtctgacttccagaccgatggcggcctggttcacctggcgctggcgtttaacccgtctcaccttgagattgtaagcccggtcgttatcggttctgttcgtgcccgtctggacagactcgacgagccgagcagcaacaaagtgctgccaatcaccattcatggtgacgccgcagtgaccgggcagggcgtggttcaggaaaccctgaacatgtcgaaagcgcgtggttatgaagttggcggtacggtacgtatcgttatcaacaaccaggttggcttcaccacctctaacccgctggatgcccgttcgacgccgtactgtactgatatcggtaagatggttcaggcaccgattttccacgttaacgcggatgatccggaagccgttgcctttgttacccgtctggcgctcgatttccgtaacacctttaaacgtgatgtcttcatcgacctggtatgctaccgccgtcacggccacaacgaagccgacgagccgagcgcaacccagccgctgatgtatcagaaaatcaaaaaacatccgacgccgcgcaaaatctacgctgacaagctggagcaggaaaaagtcgcgacgctggaagatgccaccgagatggttaacctgtaccgcgatgcgctggatgctggcgattgcgttgtagcagagtggcgtccgatgaacatgcactctttcacctggtcgccgtacctcaaccacgaatgggacgaagagtacccgaacaaagttgagatgaagcgcctgcaggaactggctaaacgcatcagcacggtgccggaagcagttgaaatgcagtctcgcgttgccaagatttatggcgatcgccaggcgatggcagccggtgagaaactgttcgactggggcggcgcggaaaacctcgcttacgccacgttggttgacgaaggcattccggttcgcctgtcgggtgaagactccggtcgcggtaccttcttccaccgccacgcggtgatccacaaccagtctaacggttccacttacacgccgctgcaacatatccataacggccagggcgcgttccgcgtctgggactctgtactgtctgaagaagccgtactggcgtttgaatacggttatgccaccgcagaaccacgcaccctgaccatctgggaagcacagttcggtgacttcgccaacggtgcacaggtggttatcgaccagttcatctcctctggcgaacagaaatggggccggatgtgtggcctggtgatgttgctgccgcacggttacgaagggcaggggccggagcactcctccgcgcgtctggaacgttatctgcaactttgcgctgagcaaaacatgcaggtttgcgtaccttctaccccggcacaggtttaccacatgctgcgtcgtcaggcgttgcgcgggatgcgtcgtccactggtcgtgatgtcgccgaaatccctgctgcgtcatccgctggcggtatccagcctcgaagaactggcgaacggcaccttcctgccagccatcggtgaaatcgacgagcttgatccgaagggcgtgaagcgcgtagtgatgtgttctggtaaggtttattacgacctgctggaacaacgtcgtaagaacaatcaacacgatgtcgccattgtgcgtatcgagcaactctacccgttcccgcataaagcgatgcaggaagtgttgcagcagtttgctcacgtcaaggattttgtctggtgccaggaagagccgctcaaccagggcgcatggtactgcagccagcatcatttccgtgaagtgattccgtttggggcttctctgcgttatgcaggccgcccagcctccgcctctccggcggtagggtatatgtccgttcaccagaaacagcaacaagatctggttaatgacgcgctgaacgtcgaataaataaaggatacacaatgagtagcgtagatattctggtccctgacctgcctgaatccgtagccgatgccaccgtcgcaacctggcataaaaaacccggcgacgcagtcgtacgtgatgaagtgctggtagaaatcgaaactgacaaagtggtactggaagtaccggcatcagcagacggcattctggatgcggttctggaagatgaaggtacaacggtaacgtctcgtcagatccttggtcgcctgcgtgaaggcaacagcgcgggtaaagaaaccagcgccaaatctgaagagaaagcgtccactccggcgcaacgccagcaggcgtctctggaagagcaaaacaacgatgcgttaagcccggcgatccgtcgcctgctggctgaacataacctcgacgccagcgctattaaaggcacgggtgtgggtggtcgtctgacccgtgaagatgtggaaaaacatctggcgaaagccccggcgaaagagtctgctccggcagcggctgctccggcggcgcaaccgaccctggctgcacgtagcgaaaaacgtgtgccgatgactcgcctgcgtaagcgtgtggcagagcgtctgctggaagcgaaaaactccaccgccatgctgaccacgttcaacgaagtcaacatgaagccgattatggatctgcgtaagcagtacggtgaagcgtttgaaaaacgccacggcattcgtctgggctttatgtccttctacgtgaaagcggtggttgaagccctgaaacgttacccggaagtgaatgcgtctatcgacggcgatgatgtggtctaccacaactatttcgacgtcagtatggcggtttctacgccgcgcggcctggtgacgccggttctgcgtgatgtcgataccctcggcatggcagacatcgagaagaaaatcaaagagctggctgttaaaggccgtgacggcaagctgacggttgaagatctgaccggtggtaacttcaccatcaccaacggtggtgtgttcggttccctgatgtcaacgcctatcatcaacccaccgcagagcgcaattctgggtatgcacgctatcaaagatcgtccgatggcagtgaatggccaggttgagatcctgccgatgatgtacctggcgctgtcctacgatcaccgtttgatcgatggtcgcgaatccgtgggcttcctggtaacgatcaaagagttgctggaagatccgacgcgtctgctgctggacgtttagtagtttaagcttcacctgcactgtagaccgacgtggatagggtgtcggtctacggtttaaaagataacgattactgaaggatggacagaacacatgaacttacatgaatatcaggcaaaacaactttttgcccgctatggcttaccagcaccggtgggttatgcctgtactactccgcgcgaagcagaagaagccgcttcaaaaatcggtgccggtccgtgggtagtgaaatgtcaggttcacgctggtggccgcggtaaagcgggcggtgtgaaagttgtaaacagcaaagaagacatccgtgcttttgcagaaaactggctgggcaagcgtctggtaacgtatcaaacagatgccaatggccaaccggttaaccagattctggttgaagcggcgaccgatatcgctaaagagctgtatctcggtgccgttgttgaccgtagttcccgtcgcgtggtctttatggcctccaccgaaggcggcgtggaaattgaaaaagtggcggaagaaactccgcacctgatccacaaagttgcgcttgatccgctgactggcccgatgccgtatcagggacgcgaactggcgtttaaactgggtctggaaggtaaactggttcagcagttcaccaaaatcttcatgggcctggcgaccattttcctggagcgcgaccttgcgcttatcgaaatcaacccgctggttattaccaaacagggcgatctgatttgcctcgacggcaaactgggcgctgatggcaacgcactgttccgccagcctgatctgcgtgaaatgcgtgaccagtcgcaggaagatccgcgtgaagcacaggctgcacagtgggaactgaactacgttgcgctggacggtaacatcggttgtatggttaacggcgcaggtctggcgatgggtacgatggacatcgttaaactgcacggcggcgaaccggctaacttcctggacgttggcggcggcgcaaccaaagaacgtgtaaccgaagcgttcaaaatcatcctctctgacgacaaagtgaaagccgttctggttaacatcttcggcggtatcgttcgttgcgacctgatcgctgacggtatcatcggcgcggtagcggaagtgggtgttaacgtaccggtcgtggtacgtctggaaggtaacaacgccgaactcggcgcgaagaaactggctgacagcggcctgaatattattgcagcaaaaggtctgacggatgcagctcagcaggttgttgccgcagtggaggggaaataatgtccattttaattgataaaaacaccaaggttatctgccagggctttaccggtagccaggggactttccactcagaacaggccattgcatacggcactaaaatggttggcggcgtaaccccaggtaaaggcggtactacccacctcggcctgccagtgttcaacaccgtgcgtgaagctgttgctgctactggcgctaccgcctctgttatctacgtaccagcaccgttctgcaaagactccattctggaagctatcgatgcaggcatcaaactgattatcaccatcactgaaggcatcccgacgctggatatgctgacggtgaaagtgaaactggatgaagcaggcgttcgtatgatcggcccgaactgcccaggcgttatcaccccgggggaatgcaaaatcggtatccagccgggtcacattcacaaaccgggtaaagtgggtatcgtttcccgttccggtacgctgacctatgaagcggttaaacagaccacggattacggtttcggtcagtcgacctgcgttggtatcggcggcgacccgatccctggttctaactttatcgacatcctcgaaatgttcgaaaaagatccgcagaccgaagcgatcgtgatgatcggtgagatcggcggtagcgctgaagaagaagcagcggcgtacatcaaggagcacgttaccaagccagttgtgggttacatcgctggtgtgactgcgccgaaaggcaaacgtatgggtcacgcaggtgcgatcattgccggtggtaaagggactgcggatgagaaattcgctgctctggaagccgcaggcgtgaaaaccgttcgcagcctggcggatatcggtgaagcactgaaaactgttctgaaataaatatctgtaataagaaatagccctcgccgcttccctctacaggaggggcgaagggctgtcggtttcgacatggttggccatcttatgatggccttttttattcgggcactaatctgaaaagtttgcccactgcttttctcccatcttctgcgcaataatgcccggcaaaatatcccctctccgttctgtaaaagcatttatacaagaagaaaattgttctgccggttgctctggccctgatgggtgtaaattcggacgtttatgcggccgatgtaaatatcgatattttaagtgcgacagtgaaagataaacgcattgagggagtatcggtgacgctgcaacgcaatggcgcacaatctgtttctggaaccacaaatgcatcgggcagcgttaatctgggttctacatttgctgatgatcaagatgctttattgatcgtcaaaaaagagggctattctaatctggtggtcaaatgttcgtgtgctggcatgacttatgcgattagtccggcaatgactagtctggatggcatgcgtgtagttttgagctggggcgaaaagccttttgatcttgattcacatttgatcttctctggcggacatatctattttgatagtaaagaggggactgatgctaatctggatgttgatgatacggatagctatggaccagaaactgtcactatcagcaaaaagcattttggcgaaagttacatctatgccgtgcaggactatagcaataaagggttgcccaacagtaattatctctctgccagtaaggcaaaagtgtttgtttatgtagggagctccctggtgcgtagttatagtgtccctgctggaaaacgagggaacatctggaccgtgtttaaactcaatccaaacggcgagtttgaagatatcaactctgttaccagcgccaattttaacgacaccacattagacgtcagggatttagccactgtgataatgcctgcgacggactcttcagctccggcttcgcctgcgatgcaaaacagtggagatactcaactggcaagaaaatataatcgcgaaggtgaagctgtttataaaaccggtcaacttgagcaagccattcaactcttccaacaggcaacagaattagacggcaattacggacaggcatttagtaacctggggctggcgtatcagaaaaatggcaacatagcggaagcaatttaggcaaatcgtaaagcgatctcgttagcctgtggagcaaatgcggcgacaacgcgcgctaactcctattataacattgccaaaatttatggaactgctggacaggacgctgatgcattgcagcattatcaactcgctcttcacgatgccattttataacaatgaaagtggaatcatatttttaaattttatattcttgcttgtttttctggtgaagttatccatcattcactgttctattatcttaaggatgatggaaatagaaggttttttaatgataataaaacatattcttatgttatttaatcacgaattttttaatatgattatgtatcaatacattatattacccgatgtgttactgaattatcgattattactttaatatttagtgatcgtaaacatggttctccagattactaaatttctggcatcttacaatatcatcatcttcaaatagttaaattaagattattgcactgccaaaacagataaattgaagcagtctggtagatattgcagaacaaccttgattccaacggcgaaatcgtatttatcctccaggttgccgtccatatggagttgaatatcattcagtccacgcttgatgagtcgatatcgctatatccatagacagggtagctttttacacgagagtgtccggtgttttctaacggctggcaatcattccgttttgttgtttcgtatcactgctataacaatttctcttgattttcaatctttgagctaatcattgaatacagatcgggaaatattaataccatatatgttttattttgaaaatccttgttccatctgactatacctaaggtatctatttcttcttgtgattattaccaatgaaacaataagtgacggatttacagtacgttgctcataaagacaacaatcaattaacgttgataaaaatatgttatgtaaaatggcaataaagtagctactctaactaattagtattataaaaagtcgataaagcggctctgttaaataaaatactggttttttatctatatatttccatgtgggtaattttactgtgctattttgttacaataaattaacaataaagttaccagtggctcatgattcacacataattaacatatgtggttgattttgatataaatcaatttttaattcttgaaaaaaatctgcaaaacacgataaattgttgtagatcaaattggtgagatcgtgacaatttcgctataaattgatcactgtcgaaaaatgcaaatttgctcaataaaaacctgtttattgtaaggattttgcggcgtaatataattacgggatcaatttggtttattcattaacacatttgtaacttttttatcattgtcttttcctcttttgatgaaatggcaacgatagaggcgagcaaataattttgtattggggcatgcgtgtgaccctttctaacggggttcactctcggagtcttcatgcgatgagcaaggagtcatgatgttagatatagtcgaactgtcgcgcttacagtttgccttgaccgcgatgtaccacttcctttttgtgccactgacgctcggtatggcgttcctgctggccattatggaaacggtctacgtcctttccggcaaacagatttataaagatatgaccaagttctggggcaagttgtttggtatcaactttgctctgggtgtggctaccggtctgaccatggagttccagttcgggactaactggtcttactattcccactatgtaggggatatcttcggtgcgccgctggcaatcgaaggtctgatggccttcttcctcgaatccacctttgtaggtctgttcttcttcggttgggatcgtctgggtaaagttcagcatatgtgtgtcacctggctggtggcgctcggttcaaacctgtccgcactgtggattctggttgcaaacggctggatgcaaaacccaatcgcgtccgatttcaactttgaaactatgcgtatggagatggtgagcttctccgagctggtgcttaacccggttgctcaggtgaaattcgttcacaccgtagcttctggttatgtgactggcgcaatgttcatcctcggtatcagcgcatggtatatgctgaaaggtcgtgacttcgccttcgctaaacgctcctttgctatcgctgccagcttcggtatggctgccgttctgtctgttattgttctgggtgatgaatccggctacgaaatgggcgacgtgcagaaaaccaaactggctgctatcgaagccgagtgggaaacgcaacctgcacctgctgcctttactctgttcggcattcctgatcaggaagaggaaacgaacaaatttgcgatccagatcccttacgcgctgggcatcattgcaacgcgttccgtggatactccagttatcggcctgaaagaactgatggtgcagcatgaagaacgcattcgtaacgggatgaaggcgtactctctgctcgaacaactgcgttctggttctaccgaccaggccgttcgtgaccagttcaatagcatgaagaaagatctcggttacggtctgctgctgaaacgctatacgccaaacgtggctgatgcgactgaagctcagattcaacaggcaaccaaagactccattccgcgtgtagcgccgctgtactttgcgttccgtatcatggtggcgtgtggcttcctgctgctggcaatcattgcgctctctttctggagtgtcatccgcaaccgcattggcgagaaaaaatggctgctgcgcgccgcgctgtacggtattccgctgccgtggattgctgtagaagcgggctggttcgtggctgaatatggccgccaaccgtgggctatcggtgaagtgctgccgacagctgtggcgaactcgtcactgaccgcaggcgatctcatcttctcaatggtgctgatttgcggcctgtataccctgttcctggtggcagaattgttcttaatgttcaagtttgcacgcctcggcccaagcagcctgaaaaccggtcgctatcactttgagcagtcttccacgactactcagccggcacgctaagacaggagtcgtcaaatgatcgattatgaagtattgcgttttatctggtggctgctggttggcgttctgctaattggttttgcagtcactgacggtttcgacatgggggtgggcatgctcacccgtttcctcggtcgtaacgacaccgagcgtcgaattatgattaactccatcgcaccacactgggacggtaaccaggtttggctgatcaccgcaggcggcgcactgtttgctgcctggccgatggtctatgccgctgcgttctccggcttctatgtggcgatgatcctcgtgctggcgtctttgttcttccgtccggtcggttttgactaccgctccaagattgaagaaacccgctggcgtaacatgtgggactggggcatcttcattggtagcttcgttccgccgctggtgattggtgtagcgttcggtaacctgttgcagggcgtaccattcaacgttgatgaatatctgcgtctgtactacaccggtaacttcttccagctgcttaacccgttcggcctgctggcaggtgtggtgagcgtagggatgatcattactcagggcgcaacctatctgcaaatgcgtaccgtgggcgaactgcacctgcgtacccgtgcaacggctcaggtggcggcactggtgacgctggtctgcttcgcactggctggcgtatgggtgatgtacggtatcgatggttatgtcgtgaaatcgacaatggaccattacgcagcctctaacccgctgaataaagaagtggttcgtgaagctggcgcatggctggttaacttcaacaacacgccaattctgtgggctattccggcactgggtgtggttctgccgctgctgaccatcctgactgcacgtatggataaagccgcgtgggcgtttgtgttctcctccctgacgctggcctgcatcatcctgactgccggtatcgcaatgttcccgtttgtgatgccgtccagcaccatgatgaacgcaagtctgacaatgtgggatgcaacttccagccagctgacgcttaacgtcatgacctgggttgcggtggttctggtaccgatcattctgctctacaccgcctggtgttactggaaaatgttcggtcgtatcaccaaagaagatattgaacgtaacacccactctctgtactaagtaaggagctaaaaatgtggtatttcgcatggattctgggaacgcttcttgcctgttcgtttggggtaatcaccgcgctggcgcttgagcacgtcgaatcaggcaaagccggtcaagaagacatctgatgagtaagattatcgcaaccttgtatgcggtaatggacaagcgccccctgcgggcgctttccttcgtgatggcacttctgttagcaggatgtatgttttgggacccatcacgtttcgccgcgaagaccagtgaactggaaatctggcatggtttactgcttatgtgggccgtctgtgctggtgtgattcacggcgtgggctttcgtccgcagaaggttctctggcaagggattttttgcccattgcttgccgatattgttctcattgtcgggctgattttcttcttcttttaaatcagaattctctttaaaaatttatgggccgagtcaggcccataaatttttacgctcccttaacttgccctcattcccaaacctcaatcgcgcgcgtatagtagcagcgtttaaaagctctaacttttgttgcattaccgggatgtaaagtgaatacaacgctgtttcgatggccggttcgtgtctactatgaagataccgatgccggtggtgtggtgtaccacgccagttacgtcgctttttatgaaagagcacgcacagagatgctgcgtcatcatcatttcagtcaacaggcgctgatggctgaacgcgttgcctttgtggtacgtaaaatgacggtggaatattacgcacctgcgcggctcgacgatatgctcgaaatacagactgaaataacatcaatgcgtggcacctctttggttttcacgcaacgtattgtcaacgccgagaatactttgttgaatgaagcagaggttctggttgtttgcgttgacccactcaaaatgaagcctcgtgcgcttcccaagtctattgtcgcggagtttaagcagtgactgacatgaatatccttgatttgttcctgaaggctagccttctggttaaacttatcatgttgattttgattggtttttcaatcgcatcctgggccattattatccagcggacccgtattcttaacgcagcggcgcgcgaagccgaagcgtttgaagataaattctggtctggaatcgaactctctcgcctctatcaagagagccaggggaaacgggataatctgagcggttcggaacaaatcttttacagcggcttcaaagagtttgtgcgcctgcatcgtgccaatagccatgcgccggaagccgtagtggaaggggcgtcgcgtgcgatgcgtatttccatgaatcgtgaacttgaaaatctggaaacgcacattcctttcctcggtacggttggctccatcagcccgtatattggtctgtttggtacggtctgggggatcatgcacgcctttatcgccctcggggcggtaaaacaagcaacactgcaaatggttgcgcccggtatcgcagaagcgttgattgcgacggcaattggtttgttcgccgcaattccggcggtaatggcttataaccgcctcaaccagcgcgtaaacaaactggaactgaattacgacaactttatggaagagtttaccgcgattctgcaccgccaggcgtttaccgttagcgagagcaacaaggggtaagccatggccagagcgcgtggacgaggtcgtcgcgatctcaagtccgaaatcaacattgtaccgttgctggacgtactgctggtgctgttgctgatctttatggcgacagcgcccatcatcacccagagcgtggaggtcgatctgccagacgctactgaatcacaggcggtgagcagtaacgataatccgccagtgattgttgaagtgtctggtattggtcagtacaccgtggtggttgagaaagatcgtctggagcgtttaccaccagagcaggtggtggcggaagtgtccagccgtttcaaggccaacccgaaaacggtctttctgatcggtggcgcaaaagatgtgccttacgatgaaataattaaagcactgaacttgttacatagtgcgggtgtgaaatcggttggtttaatgacgcagcctatctaaacatctgcgtttcccttgcttgaaagagagcgggtaacaggcgaacagtttttggaaaccgagagtgtcaaaggcaaccgaacaaaacgacaagctcaagcgggcgataattatttcagcagtgctgcatgtcatcttatttgcggcgctgatctggagttcgttcgatgagaatatagaagcttcagccggaggcggcggtggttcgtccatcgacgctgtcatggttgattcaggtgcggtagttgaacagtacaaacgtatgcaaagccaggaatcaagcgcgaagcgttctgatgagcagcgcaagatgaaggagcagcaggctgctgaagaactgcgtgagaaacaagcggctgaacaggaacgcctgaagcaacttgagaaagagcggttagcggctcaggagcagaaaaagcaggctgaagaagccgcaaaacaggccgagttaaagcagaagcaagcggaagaggcggcagcgaaagcggcggcagatgctaaagcgaaggccgaagcggatgctaaagctgcggaagaagcagcgaagaaagcggcggcagacgcgaagaaaaaagcagaagcagaagccgccaaagccgcagtcgaagcgcagaaaaaagccgaggctgctgctgcggcgctgaagaagaaagctgaagcggcagaagcagctgcagctgaagcaagaaagaaagcggcaaccgaagctgctgaaaaagccaaggcagaagctgagaagaaagcggctgctgaaaaggctgcagctgataagaaagcggcagcagagaaagcggcagccgacaaaaaagcagcagaaaaagcggctgctgaaaaggcagcagctgataagaaagcagcggcagaaaaagccgccgcagacaaaaaagcggcagcggcaaaagcagcagctgaaaaagccgctgcagcaaaagctgccgcagaggcagatgatattttcggtgagctaagctctggtaagaatgcaccgaaaacggggggaggggcgaaagggaacaatgcttcgcctgccgggagtggtaatactaaaaacaatggcgcatcaggggccgatatcaataactatgccgggcagattaaatctgctatcgaaagtaagttctatgacgcatcgtcctatgcaggcaaaacctgtacgctgcgcataaaactggcacccgatggtatgttactggatatcaaacctgaaggtggcgatcccgcactttgtcaagctgcgttggcagcagctaaacttgcgaagatcccgaaaccaccaagccaggcagtatatgaagtgttcaaaaacgcgccattggacttcaaaccgtaatcgcgatgttgactgttccgacggtcaacatcaggcaccggttgccacggggttctggtagttttgtgtattttagtttgttaacattctgctaaattatcgtgggccatcggtccagataagggagatatgatgaagcaggcattacgagtagcatttggttttctcatactgtgggcatcagttctgcatgctgaagtccgcattgtgatcgacagcggtgtagattccggtcgtcctattggtgttgttcctttccagtgggcggggcctggtgcggcacctgaagatattggcggcatcgttgctgctgacttgcgtaacagcggtaaatttaatccgttagatcgtgctcgtttgccacagcagccgggtagtgcgcaggaagtacaaccagctgcatggtccgcgctgggcattgacgctgtggttgtcggtcaggtcactccgaatccggatggttcttacaatgttgcttatcaacttgttgacactggcggcgcaccgggtactgtacttgctcagaactcgtacaaagtgaacaagcagtggctgcgttatgctggtcataccgccagtgacgaagtatttgaaaaactgaccggtattaaaggtgcgttccgtacccgtattgcctacgttgttcagactaacggcggtcagttcccgtatgaactgcgcgtatctgactatgacggttacaaccagtttgtcgttcaccgttcaccgcaaccgctgatgtctccggcgtggtcaccagacggttctaaactggcttatgtgaccttcgaaagcggtcgttccgcgctggttattcagacgctggcaaatggcgctgtacgtcaggtggcttcattcccgcgtcacaacggtgcacctgcattctcgccagacggcagcaaactggcattcgccttgtcgaaaaccggtagcctgaacctgtacgtaatggatttggcttctggtcagatccgccaggtaactgatggtcgcagtaacaataccgaaccgacctggttcccggacagccagaacctggcatttacttctgaccaggccggtcgtccgcaggtttataaagtgaatatcaacggcggtgcgccacaacgtattacctgggaaggttcgcagaaccaggatgcggatgtcagcagcgacggtaaatttatggtaatggtcagctccaacggtgggcagcagcacattgccaaacaagatctggcaacgggaggcgtacaagttctgtcgtccacgttcctggatgaaacgccaagtctggcacctaacggcactatggtaatctacagctcttctcaggggatgggatccgtgctgaatttggtttctacagatgggcgtttcaaagcgcgtcttccggcaactgatggacaggtcaaattccctgcctggtcgccgtatctgtgataataattaattgaatagtaaaggaatcattgaaatgcaactgaacaaagtgctgaaagggctgatgattgctctgcctgttatggcaattgcggcatgttcttccaacaagaacgccagcaatgacggcagcgaaggcatgctgggtgccggcactggtatggatgcgaacggcggcaatggcaacatgtcttccgaagagcaggctcgtctgcaaatgcaacagctgcagcagaacaacatcgtttacttcgatctggacaagtacgatatccgttctgacttcgctcaaatgctggatgcacatgcaaacttcctgcgtagcaacccgtcttacaaagtcaccgtagaaggtcacgcggacgaacgtggtactccggaatacaacatctccctgggtgaacgtcgtgcgaacgctgttaagatgtatctgcagggtaaaggcgtttctgctgaccagatctccatcgtttcttacggtaaagaaaaacctgcagtactgggtcatgacgaagcggcgtatgccaaaaaccgtcgtgcggtactggtttactaagagaattgcatgagcagtaacttcagacatcaactattgagtctgtcgttactggttggtatagcggccccctgggccgcttttgctcaggcaccaatcagtagtgtcggctcaggctcggtcgaagaccgcgtcactcaacttgagcgtatttctaatgctcacagccagcttttaacccaactccagcaacaactctctgataatcaatccgatattgattccctgcgtggtcagattcaggaaaatcagtatcaactgaatcaggtcgtggagcggcaaaagcagatcctgttgcagatcgacagcctcagcagcggtggtgcagcggcgcaatcaaccagcggcgatcaaagcggtgtggcggcatcaacgacgccgacagctgatgctggtactgcgaatgctggcgcgccggtgaaaagcggtgatgcaaacacggattacaatgcagctattgcgctggtgcaggataaatcccgccaggatgacgcaatggtggcatttcagaatttcatcaaaaattaccctgattcaacttacctgccaaacgccaattattggctgggtcagttaaactacaacaagggtaaaaaagatgatgcggcgtattattttgcttcggtagtgaaaaactatccgaagtcaccgaaggctgcagatgcgatgtttaaagtcggcgtcatcatgcaggacaaaggtgacaccgcaaaagcgaaagccgtataccagcaggttatcagtaaataccctggtactgatggcgctaaacaggcgcaaaaacgtctgaacgcgatgtaatgcataacacacgaccagaagtcgcattatttctggtcgtgtcgtgcgaatcataagcagttgagtgatctgcatcgaaatttttgttgcgctcaagtctgaaatcagtaatatatgccgccgttgccacgggatatcaaacaaaccgaaagcaacgaaaaagtgggtcgttagctcagttggtagagcagttgacttttaatcaattggtcgcaggttcgaatcctgcacgacccaccactaacatagttagttgtagtatccagcgtagtatcgggtgattagctcagctgggagagcacctcccttacaaggagggggtcggcggttcgatcccgtcatcacccaccaccgggtcgttagctcagttggtagagcagttgacttttaatcaattggtcgcaggttcgaatcctgcacgacccaccactaattactgtgggttcggtggaagtagtttgtagtatccagcgcagtatcgggtgattagctcagctgggagagcacctcccttacaaggagggggtcggcggttcgatcccgtcatcacccaccactcgggtcgttagctcagttggtagagcagttgacttttaatcaattggtcgcaggttcgaatcctgcacgacccaccaattttaaacattggttccgagtagaaatctttcaggtaacacccgtatgggtcgttagctcagttggtagagcagttgacttttaatcaattggtcgcaggttcgaatcctgcacgacccaccatcctgaatgattaaagcagcataatcccgcaaggggtcgttagctcagttggtagagcagttgacttttaatcaattggtcgcaggttcgaatcctgcacgacccaccaatgcaaaaaagcgccctaaaggcgcttttttgctattcaggcatctctcaatttcaattcttgaccctgatgacatactccgcgtttgctgcgtaaacaactctacgtcggaggaataagacgcaaagtgtggcattcggcatctcatacgtaattcgagtgacttttctccaccattcgactatcttgtttagcatataaaacaaattacgccgataatagcgaatatcacgcttaagtcggttttaacgttaagcctgtaaaacgagatggtaagatgagcgtgatgtttgatccagacacggcgatttatcctttccccccgaagccgacgccgttaagcattgatgaaaaagcgtattaccgcgagaagataaaacgtctactaaaagaacgtaatgcggtgatggttgcccactactataccgatcccgaaattcaacaactggcagaagaaaccggtggctgtatttctgattctctggaaatggcgcgcttcggtgcaaagcatcccgcttctacgttgttagttgctggggtgagatttatgggagaaaccgccaaaattctcagtccggaaaaaacaattctgatgccgacactacaggctgaatgttcactggatctcggctgccctgttgaagaatttaacgcattttgcgatgcccatcccgatcgtactgtcgtcgtctacgccaacacttctgctgcggtaaaagcgcgcgcagattgggtggtaacttcaagcattgccgtcgaacttattgatcatctggatagtttgggtgaaaaaatcatctgggcacctgacaaacatctggggcgttacgtgcaaaaacagacgggcgcagacattttatgctggcagggtgcctgcattgtgcatgatgaatttaagactcaagcgttaacccgcttgcaagaagaatacccggatgctgccatactggtgcatccagaatcaccgcaagctattgtagagatggcggatgcggtcggttccaccagtcaactgatcgctgctgcgaaaacattgccacatcagcggcttatcgtggcaaccgatcggggcattttctacaaaatgcagcaggcggtgccagataaagagttactggaagcaccaaccgcgggtgagggcgcaacctgtcgcagctgcgcgcattgcccgtggatggccatgaatggccttcaggccatcgcagaggcattagaactggaaggaagcaatcacgaggtttatgttgatgaaaggctgcgagagagggcgctggtgccgctcaatcgtatgctggattttgcggctacactacgtggataattgataataaggcgtcacattacgctttgggggaacgatggatttttttagtgtgcagaatatcctggtacatataccaataggggcaggcggttatgatctctcatggatcgaagcggtaggcacgatcgccgggttgctgtgtattggccttgccagtctggagaagatcagtaactacttctttggcctgatcaacgtcactttgtttggcattattttctttcagattcagctgtatgccagcctgttattacaggtgtttttctttgccgcgaatatttacggctggtatgcgtggtcgcgacaaaccagtcagaacgaggcggagttgaaaattcgctggttgccattgccgaaggcgctaagctggctggcggtttgcgttgtttcgattggtctgatgacggtatttatcaatccggtgtttgcatttttgacccgcgtggcagtcatgatcatgcaagcattaggattacaggttgcgatgcctgaactacagccggacgctttcccgttctgggattcatgcatgatggtgttatctatcgtggcaatgattctgatgacgcgtaagtatgtggaaaactggctgttgtgggtgattattaacgtgattagcgtcgttatttttgcacttcagggcgtttacgccatgtctctggagtacatcatcctgacctttattgccctcaacggcagccggatgtggatcaacagcgcacgcgaaagaggttcacgcgcgctgtcccattaatggtgatgatgtgaatggccagacaccccttcattcaggtggcagtctggcccatgacaaggttgatattccatctgaatagtggcgtgctcaatctgatagtgatccatcaggtagtgttggatctgatctaacaaggcatcgtgatcgtgtggcgggatcacctgcacatgcagcgtcatcaccggcttctcgcctaccatccatacatgcacatggtgcacattgcggacttccgggatttcccggcacaagcgacgcttcagttcagcgatatccagcgataccggtgcaccttcaagtaattcattcacactatctttcaacagtcgccacgcgctacgcagaaccagaagcgacaccagtatgagtgtgagtgcgccatgacgagtcatcccttaattattctcacttaactttatgacatcatactgcttttagaagggaaaaattaaaagggagagactccgctctcccattattggctatttcgcagggttactgcgtggtaccgtcggttttggtatcgacatcattgttgatgccatcaccggtttggacttttttattgatatccgggcagcgaccatctttgcacatggtgttcttgtgctcttcatctttggtcatgccgtcattgttcattgaagaaccatccggatgcagcattgtgccgccagaaccggtatttaccccgttattgtcgacgttatttggcgcgacattttcacgggcatcaggggctacctggcccgcatcagctgcggcgtttgcctggccgttattgctttgcgctccgctatcggcagccagtgcggcaccgctggcaaggcttagagtggcagtcaaaaatagtgtggccagttttgtcattttcataggatgctcctgttatggtcgttatgtcggataacctcttccaacagtgcatttgcaggtgaatataaggcaatggtttaagatttcagccaggcaaagatacccagcagagaatcttgaaataattaacaaacaaaggagttacagttagaaattgtaggagagatctcgtttttcgcgacaatctggcgtttttcttgctaattccaggattaatccgttcatagtgtaaaaccccgtttacacattctgacggaagatatagattggaagtattgcattcactaagataagtatggcaacactggaacagacatgaattatcagaacgacgatttacgcatcaaagaaatcaaagagttacttcctcctgtcgcattgctggaaaaattccccgctactgaaaatgccgcgaatacggtcgcccatgcccgaaaagcgatccataagatcctgaaaggtaatgatgatcgcctgttggtggtgattggcccatgctcaattcatgatcctgtcgcggctaaagagtatgccactcgcttgctgacgctgcgtgaagagctgcaagatgagctggaaatcgtgatgcgcgtctattttgaaaagccgcgtactacggtgggctggaaagggctgattaacgatccgcatatggataacagcttccagatcaacgacggtctgcgtattgcccgcaaattgctgctcgatattaacgacagcggtctgccagcggcgggtgaattcctggatatgatcaccccacaatatctcgctgacctgatgagctggggcgcaattggcgcacgtaccaccgaatcgcaggtgcaccgcgaactggcgtctggtctttcttgtccggtaggtttcaaaaatggcactgatggtacgattaaagtggctatcgatgccattaatgccgccggtgcgccgcactgcttcctgtccgtaacgaaatgggggcattcggcgattgtgaataccagcggtaacggcgattgccatatcattctgcgcggcggtaaagagcctaactacagcgcgaagcacgttgctgaagtgaaagaagggctgaacaaagcaggcctgccagcgcaggtgatgatcgatttcagccatgctaactcgtcaaaacaattcaaaaagcagatggatgtttgtactgacgtttgccagcagattgccggtggcgaaaaggccattattggcgtgatggtggaaagccatctggtggaaggcaatcagagcctcgagagcggggaaccgctggcctacggtaagagcatcaccgatgcctgcattggctgggatgataccgatgctctgttacgtcaactggcgagtgcagtaaaagcgcgtcgcgggtaaagtttaattgtcggatgcgccgtcagagtggcgtatccgattaatcaccggaggcctgataaaacgcgcagcgtcgcatcaggcaatgtgctccattgttagcaacgacaaacaaaaaagccgactcacttgcagtcggctttctcatttttaaacgaatgacgtttacttcgctttaccctggttagcaaccgccgctgctttcgccgcgatctcgtcagcattacccagataatagcgtttcagcggtttgaagttctcgtcaaactcataaaccagcggcacgccggtcgggatattcagctcaagaatctcttcttcgctcatgttatcgagatatttcaccagcgcacgtaacgagttaccgtgtgcggcgatgatgacgcgctcaccgctcttcatacgtggcagaatggtttcattccagtaagggatcacgcggtcaatggtcagcgccaggctttccgtcagcggcagctctttctcgctcagtttcgcgtaacgcggatcgtgccccggataacgctcatcatctttagtcagttccggcggagtcaccgcaaaaccacgacgccactgtttcacctgctcgtcgccatacttttcagcggtttccgctttgttcagaccctgcaacgcaccgtagtgacgttcgttcagtttccaggatttctcaacgggcagccatgcctgatccagttcgtccaacacattccacagggtatgaatagcgcgtttcagcacagaggtgtaagcaaagtcaaagctgtaaccttcctctttcagcagcttacctgctgcttttgcttcgcttacgcctttctcagacagatccacgtcgtaccaaccggtgaaacggttttctttgttccactgactttcgccatgacgaaccagaaccagcttagttacagccatatacttactcctcaaatcatcttttaatgataataattctcattatattgccgtgacgaagcaacagcaatgcttacgcataaccatagcgaaaatagtgtcgcagtgtaaggttgttgtgaatattgagttgcaaatatgtcggtgtttgctggtgatttgaacaatatgaagataaagccctcatgacgagggcttaacattactgagcaataaactgatattccgtcaggctggaatactcttcgccaggacgcaggaagcagtccggttgcggccattcagggtggttcgggctgtccggcagaaattcgctttccagagccagcccttgccagtcggcgtaaggttcggttccccgcgacggtgtgccgccgaggaagttgccggagtagaattgcagagccggagcggtggtgtagaccttcagctgcaatttttcatctgctgaccagacatgcgccgccactttcttgccatcgcctttggcctgtaacaagaacgcgtgatcgtaacctttcactttgcgctgatcgtcgtcggcaagaaactcactggcgatgattttggcgttgcggaaatcaaaagaggttccggcgacagatttcaggccgtcgtgcggaatgccgccttcatcaaccggcagatattcttccgccagaatctgcaacttgtgattgcgcacgtcagattgctcgccgtcaagattgaaatagacgtgattagtcatattcaccgggcaaggtttatcaactgtggcgcgataagtaatggagatacggttatcgtcggtcagacgatattgcaccgtcgcgccgagattacccgggaaaccctgatcgccatcatctgaactcagggcaaacagcacctgacgatcgttctggttcacaatctgccagcgacgtttgtcgaacccttccgggccgccatgcaattggttgacgccctgacttggtgaaagcgtcacggtttcaccgtcaaaggtataacggctattggcgatgcggttggcataacgaccaatagaggcccccagaaatgcggcctgatcctgatagcattccgggctggcgcagccaagcagcgcctcgcggacgctgccatcggaaagcggaatacgggcggaaagtaaagtcgcaccccagtccatcagcgtgactaccatccctgcgttgttacgcaaagttaacagtcggtacggctgaccatcgggtgccagtgcgggagtttcgttcagcactgtcctgctccttgtgatggtttacaaacgtaaaaagtctctttaatacctgtttttgcttcatattgttcagcgacagcttgctgtacggcaggcaccagctcttccgggaacaacgcgacgatacagccaccaaatccgccgccggtcatgcgtacgccacctttgtcgccaatcacagctttgacgatttctaccagagtgtcaatttgcggtacggtgatttcgaaatcatcgcgcatagaggcatgagactccgccatcaactcgcccatacgtttcaggtcgccttgctccagtgcgctggcagcttcaacggtgcgggcgttttcagtcaggatatgacgcacgcgtttcgccacgattgggtccagttcatgcgcaacagcgttgaactcttcaatggtgacatcgcgcagggctggctgctggaagaaacgcgcaccggtttcgcactgttcacgacgggtgttgtattcgctgccaaccagggtacgtttgaagttactgttgatgatgacgacagccacacctttgggcatggaaactgctttggtccccagtgagcggcagtcaatcagcaaggcatgatctttcttgccgagtgcggaaatcagttgatccatgattccacagttacagcctacaaactggttttctgcttcctgaccattaagcgcgatttgtgcgccgtccagcggcagatgataaagctgctgcaatacggttccgaccgcgacttccagtgaagcggaagaacttaaccctgcaccctgcggcacattgccgctgatcaccatgtccacaccgccgaagctgttgttacgcagttgcagatgtttcaccacgccacgaacgtagttagcccattgatagttttcatgcgcgacaatgggcgcatcgagggaaaactcgtcgagctgattttcataatcggctgccattacgcgaactttacggtcatcgcgtggcgcacagctgatcacggtttgataatcaatcgcgcagggcagaacgaaaccgtcgttgtagtcggtgtgttcaccaatcaaattcacgcggccaggcgcctgaatggtgtgagtggcagggtagccaaatgcgttggcaaacagagattgtgttttttctttcagactcatttcttacactccggattcgcgaaaatggatatcgctgactgcgcgcaaacgctctgctgcctgttctgcggtcaggtctcgctgggtttctgccagcatttcataaccaaccataaatttacgtacggtggcggagcgcaacagaggcggataaaagtgcgcgtgcagctgccagtgttgattctcttcgccattaaatggcgcgccgtgccagcccatagagtaggggaaggagcactggaagaggttgtcataacgactggtcagctttttcaacgccagtgccaaatcgctgcgctgggcgtcggtcaaatcggtgatccgcaaaacgtgggctttgggcagcagtagcgtttcgaacggccaggcagcccagtaaggtacaacggctaaccagtgttcggtttcgacaacggtacggctaccgtctgccagctcgcgctgaacataatccaccagcattggcgatttctgttcggcgaaatattctttttgcagacggtcttcgcgctcagcttcgttaggcaggaagctatttgcccaaatctgtccgtgcggatgcgggttagagcagcccatcgccgcgcctttgttttcaaagacctgcacccatgggtacgtttcccccagctctgcggtttgctcctgccaggttttgacgatttccgtcaatgccgcaacgctcagttctggcaacgttttactgtgatccggtgaaaagcagatcacccggctggtaccgcgcgcgctctggcaacgcattagcggatcgttgctttctggcgcatctggcgtgtcagacatcaaggccgcaaagtcattagtgaaaacgtaagtcccggtgtaatcggggtttttatcgcctgtcacccgcacattacctgcgcagaggaagcaatctggatcgtgcgcaggtaacacctgtttggctggcgtttcctgcgccccctgccaggggcgcttagcgcggtgcggtgaaaccagaatccattgcccggtgagcgggttgtagcggcgatgtggatgatcaacgggattaaattgcgtcatggtcgttccttaatcgggatatccctgtggatggcgtgactgccagtgccaggtgtcctgcgccatttcatcgagtgtgcgcgttacgcgccagttcagttcacggtcggctttgctggcgtccgcccagtaggccggaaggtcgccctcgcgacgcggtgcaaaatgataattaaccggtttgccgcaggctttgctgaaggcattaaccacgtccagcacgctgctgcctacgccagcgccgaggttatagatgtgtacgcctggcttgttcgccagtttttccatcgccacgacgtgaccgtccgccagatccattacgtggatgtaatcgcgcacgccagtaccgtcttcggtcggataatcgttaccaaaaatcgccagcgagtcgcgacggcctacagcaacctgggcgatgtatggcatcaggttattcggaatgccttgcggatcttcgcccatatcgcccgacggatgcgcgccaactgggttgaagtagcgcagcagggcaatgctccagtccggctgggctttttgcagatcggtgaggatctgttccaccatcagcttgcttttgccgtaagggctttgcggtgtgccggtcgggaagctttcaacatatggaattttgggctgatcgccataaacggtggcggaggagctaaagataaagtttttgacgttagcggcgcgcatggcgctaatcaggcgcagggtgccgttgacattgttgtcgtaatattccagcggtttttgtaccgattcgccaacggctttcagcccggcgaagtggatcacggtgtcgatagcgtgatcgtgcaggatctcggtcatcaacgcttcgttacgaatatcgccttcaacaaacgttggatgtttgccgcctaaacgctcgataacaggcagtacgctgcgcttactgttacagaggttatcaagaatgatgacatcatgaccgttttgcagtaattgcacacaggtatgacttccaatgtaaccgctaccaccggtaaccagaactctcataattcgctccattaggcttatggtatgaaataaccatagcataacaaagatgcgaaaagtgtgacatggaataaattagtggaatcgtttacacaagaatttagccgtttttaatgtgcgattaagtgattataaaacagagggtttatgaatgattgcgctttttatctgaaaaaaagacgcggtttcatgcctgcatgcgtcaaaccgttggccggataacacgtttacgccgcctccggcacggtcagcactaccgactcagtttatttttgtcagcgcatagcgataaaagtcaccgtccggcacgaactcaagacgatgggtaatacaggcaggcgcatcttcagcgtggtgcgaaacaaacaacaattgcgtttcaccttcgctaatcagcacatcaacaaaccggcggataagctggcgattgagcggatcaagcccctgtagtggttcatcgagaataagcaacgtcggatgtttcaccagcgcgcggacgatcagcgccagacgctgctgtccccaggaaagactatggaacggagcgtcagccgtgcgtttatcaatgccgagaacatccagccactgctgcaccagtttttgctggcgatccgaaacggcctgataaatgccaatcgaatcaaaatagccagaaaggatcacattacgcacagtagtgctgacccggtaatccagatgcaaactactgctgacgtaaccgatatgctttttgatatcccagatggtttcgccgctgccgcgacgtcgtccgaaaagcgtcaaatcgttgctgtaaccttgcggatgatcgccagtaatcaggcttaataacgtcgattttcccgcgccatttggcccgacaatttgccagtgttcgcctggattcacctgccagctaaggttattaagaatggggcgttcgttataagaaaccacgccattgttcagcacaatgcgcggttcgttggcgggtaaggcgtgacgtgctgaaggttcatccggctccggcagttgcacaccttcaagctgttcgctatgcgccagttgcgcaacgagtgcttgttggagcagttcttctttagcgccagtttccgctaacgtgcaatccgccagcacgccagcaaactggacaaattctgggatctcatcgaagcgattgagcaccaataccagagtaataccggactgatgtaacgaggcgagtagctcagccagctgctgacgtgaggcaacatccaggccatcgaacggctcatcaagaatcaacaagtcaggctccgacatcagcgcctgacacagcagggtttttcgcgtctcgccagtggaaaggtatttaaagcgtcggtcgaggagggcggtaataccgaactgctgcgccagttgcatgcaacgcggagtatcctttacttcatcctgaatgatctcagccgtggtacgcccggtgtcatcttcgccagggccgagcatatcggtgttattccgctgccattcgtcgctgacgagcttttgcaattgctcgaaggagagacgagtgatgtgggaaaactggctttgccgttcacctttcaaaagcggaagttcccccgacagcgcgcgggccagcgccgatttcccgcttccattcgaaccgacaaacgcccaactatcacccgcgtttaacgttagccgaggcaattgcagcgtttttgtgttgccaagacgaaacgtgccttgcaaaatttgcaacgatgacattttatatcccattttgtgcagcgattactgacagggatacgtgtttcataacaaattgtcaacacgcttagcacagcgtggcgataatcacgctgtcggcattaaagtaggccgtgacattctgtccttgctgaagagaagtcgcttcatttaccggcactgtggcgcacagtgtttgcccgtcgggtagcgccattaatacttcgcactgctctgcgccgcgctcaatatgactaataatacctggtaattggttgtcagcgttttgcgcgaccgcatcgtcctgagtaatacctacccacggcgcttttagcaatatcaacacttctttgccttcatccagccccagacgcgcgccgctttgtgcggtaactgcgactttcaggcgtgtttttccatcagccagtaagacatcaacatgctgttgaacgtcatcatgatcgcgggcggtgatggtaccgaaccactggttacgggcgctggtttgcagtgaaaaacgtgagatcgcggccagcaggctgttcagcggcagggcgtcatcgtcacttaacacatcaaaggctttttgctggatttgcgccagtaagtcatagagttgaatcagtcgctgaccatagcgggtcagtactgcgccgcctccacctttaccgcctgttgcgcgctcaaccagaatatgctcacttaactgattcatctcgttaatggcatcccaggcgcttttatagctgataccggcatctttcgctccctggctaatggaaccggaaagcgcaatgtgttttagtagcgaaatgcggcgcgggtcggcgaataatttttgttggagcttaagggtgagaaggatttcggcctgcataacaatgtcctggcaaaagtcttattgtgacggaaaacgaacgccacgcaaagctgaccgcacaaaaggggagtgcttttctgtgcttagcggttagaatagtctcatgactatatctggagttgaccatgttagagttattaaaaagtctggtattcgccgtaatcatggtacctgtcgtgatggccatcatcctgggtctgatttacggtcttggtgaagtattcaacatcttttctggtgttggtaaaaaagaccagcccggacaaaatcattgattccctgaatgcccgcttagtcgggcattttctttttctcaacttcctgctttttctgccgatattttttctcatctacctcacaaaggttagcaataactgctgggaaaattccgaacttgccgttatattgacgcctacataacgttagattaaggggttaccaatggctcgtaaatggttgaacttgtttaccggggcggcactctctttcgctgttgctggcaatgcactggcagatgaagggaaaatcacggtgttcgccgccgcatcactgactaacgcaatgcaggacattgctacgcagtataaaaaagagaaaggcgtggatgtagtttcttctttcgcttcgtcatctactttggcccgtcagattgaagcgggtgcgcctgcggatctgtttatttctgccgatcagaaatggatggattatgcggttgataaaaaagcgatcgatacggcttcgcgccagacactgctcggcaatagcctggtcgttgtagcaccgaaagccagcgagcagaaagatttcaccatcgacagcaaaaccaactggacttcgctgctgaatggcggtcgcctcgcggttggtgatccggaacatgtccctgctggcatttatgcgaaagaagcactgcaaaaactgggcgcatgggatacgctctccccgaaactggctccggcggaagatgttcgtggcgcgctggcgttggtcgaacgcaatgaagcgccgctgggtattgtttacggttctgacgcagttgccagcaaaggggtaaaagtggttgccaccttcccggaagattcacataaaaaagtggaatatccggttgctgttgtggaagggcataacaatgcgacagtgaaagcattttacgattatctgaaggggccgcaggctgcggaaatctttaaacgttacggatttacaaccaagtaatgatactgaccgatccagaatggcaggcagttttattaagcctgaaagtttcttccctggctgtgctgtttagcctgccgtttgggatcttttttgcctggttactggtacgttgcacgtttccgggcaaagctctgctcgacagcgtactgcatctaccgctggtgttaccgcccgtggtcgtcggttacctattattagtttcgatgggacggcgcggatttatcggtgaacgtctgtatgactggtttggtctttctttcgcgtttagctggcgtggtgcggttctcgctgccgctgtcatgtcttttccgctgatggtgcgggcgattcgtctggcgctggaaggtgttgatatcaaactggagcaggccgcaagaacactgggggccgggcgctggcgcgttttctttactatcacgttaccgctgaccttaccgggaattattgttggtacggtgctggcattcgctcgttcgctcggtgaatttggcgcaaccatcacctttgtttctaacattcctggtgaaacgcgaaccattccttctgccatgtataccctgatccagacccctggcggggaaagtggcgcggcgagactgtgtattatttctattgcgctggcgatgatctccctgttgatttcagaatggctggccagaatcagccgtgagcgggcggggcgctaatcatgctggaactgaatttttcccagacgttgggcaatcattgcctgacgattaatgaaacgctgcccgccaatggcatcaccgctatttttggtgtctctggtgccggaaaaacctcgctgattaacgccatcagtgggctgacacgtccgcaaaaagggcggattgtcctcaatggtcgggtactaaatgacgccgataaaggtatctgcctgacgccagaaaagcgtcgcgtaggctatgtgtttcaggatgcgcggctgtttccgcattataaagtgcgtggcaatttgcgctacggcatggcgaaaagcatggtcaatcagttcgataagctggtggcgcttttaggcattgaaccgttgcttgatcgtttaccaggcagcctgtccggaggcgaaaaacagcgcgtggcgattggtcgggctttgctgacagcaccggaattgctgttgctggatgaaccgctggcgtcactggatattccgcgtaaacgcgaactgttgccttatctgcaacgtctgacgcgggaaatcaacattccgatgttgtatgtcagccattcgctggatgagatcctccatctggcagacagagtgatggtactggaaaacggtcaggtgaaagcctttggcgcgctggaagaagtctggggtagtagcgtgatgaatccgtggctaccgaaagagcaacaaagtagcattctgaaagtgacagtacttgagcatcatccgcattacgcgatgaccgcgctggcgctgggcgatcagcatttgtgggtcaataagctggaagaaccgctgcaagctgcgctacgcatccgcattcaggcttccgatgtctcgctggttttacaaccgccgcagcaaaccagcattcgtaacgtattgcgggcaaaagttgttaatagttatgacgacaacggccaggtggaagtggagctggaagtcggcggtaaaacgctgtgggcgcgtatcagcccgtgggccagggatgaactggcgatcaaacctggcctgtggctgtatgcgcaaattaaaagtgtgtcgataaccgcctgattaaatcaggtagctataaatgaactgggcaatgctgtcggtggtgttatcaccaatcacaatgttggcgcgcgcttttactgcgtcatcggcgttgcccatcgccacgcctgtaccagcggcttccagcatactaatatcattgaagttatcgccgaacgccacgacgttttccatcgaccagccttgtgcctcaacccatttcgtcaaacgtttacctttgctgttgccgccgcgtgcaatatcaacctgatcgtgccaggaccattcacactccagtcccagttcatgttcgacatgcttaccaaaatgctgcaattgcggcaggtcatcgtgcgtcagggcgaacttccatacggcgttaacttgttgcgccgtttcagccagagaagcgacttgtgtgaaagtcggacgctgttccggcggcagggtttgcgcccagttagacgtgcgaatgacatgcccggtcgggtgctcatagaccattgcatcatcgacatacatcagaccgtgaatgtggtgttcattcagcatctcaatgagttgcagggctttattaacgggcattgggtccgcttccagcacggtttttgcatgataatcatacaaataggtgccattacagcaaatagcaggtgtatccagcgccagcgcctgataaaaaggatgaatagcgacgtgatggcgacctgtgacgatgattaattgatagcctgcttcgcgagcgcgggccagggcttctatcgatgatggaagcaaggtctttttcggggtcaataaggtgccgtctaagtcgagagcaatcacgcgtgtggtcatggcgtattccagattaaggttaagaattttcgtctgcgcgaatggtacaccgataccactatcggacaaaattctgcgttttaattcagcattcaccgccaaaagcgactaattttagctgttacagtcagttgctaaatgcaaaggagcattcatgaagcaaacagtttatatcgccagccctgagagccagcaaattcacgtctggaacctgaatcatgaaggcgcactgacgctgacacaggttgtcgatgtgccggggcaggtgcagccgatggtggtcagcccggacaaacgctatctctatgttggtgttcgccctgagtttcgcgtcctggcgtatcgtatcgccccggacgatggcgcgctgacctttgctgcagagtctgcgctgccgggtagcccgacgcatatttccaccgatcaccaggggcagtttgtctttgtcggttcttacaatgcgggtaacgtgagcgtaacgcgtctggaagatggcctgccagtgggcgtcgtcgatgtggtcgaggggctggacggttgccattccgccaatatctcaccggacaaccgtacgttgtgggttccggcattaaagcaggatcgcatttgcctgtttacggtcagcgatgatggtcatctggtagcgcaggaccctgcggaagtgactaccgttgaaggggccggcccacgccatatggtattccatccaaacgaacaatatgcgtattgcgtcaatgagttaaacagctcagtggatgtctgggaactgaaagatccgcacggcaatatcgaatgtgtccagacgctggatatgatgccggaaaacttctccgacacccgttgggcggctgatattcatatcaccccggatggtcgtcatttatacgcttgcgaccgtaccgccagtctgattaccgttttcagcgtttcggaagatggcagcgtgttgagtaaagaaggcttccagccaacggaaacccagccgcgcggcttcaatgttgatcacagcggcaagtatctgattgccgccgggcaaaaatctcaccacatctcggtatacgaaattgttggcgaggaggggctactgcatgaaaaaggccgctatgcggttgggcaggggccaatgtgggtagtggtcaacgcgcactaaccgctgatttaaccggcgcagtctctcctgcgccggtgtattaacctatctcctgtaacgcatgtctctggcgttcgacgatattggtccacaaattgtctttatcgtcagtccacaaattaatcagcaaggcaaaaaagcgttcagctgccggagaaagcacggcatctttgcggcgaataatccccaatgtccgacgtataacgggttccaccagtgggataccaataatcgaagaatagggcgcatggggcattgccagaccaggaagcgccgaaatccccagtcccgcctccaccagccctaatgacgtcgaaagatgacgcacttcgtaaaaccagtccagcttccagggcttgtcggctagctgttgttctatcaatagtcggttgccgctggaggagcgtacgccaatcattttgtaacccactaactcctgccattctacaagctgctttttggccaatggatggtcacgccgacaggccagcacgaacggctcgttgaccagtggggtaaaatcaatggatgaatttgtgacgttgttcatgtttatgccaaagtctgattcgttacacagcaccgattccatgcaattattcgtgccttgttccagaatccgcactttaatattgggatacagctcattaaatttaccgattgccagcggtaaaaaataaaatactgcggtcggaatacacgctaacgtcaccataccacgatgataagcattcatatcacgaatattaaaaagcgtttcatcgaatttttttattaattcccgcgcctccgggagcaacctttttcctgcttttgttaacgtaaccttgcgagttgtacgctcaaatagttgaatgtgtaaatcttcctccattttttttattcttcgcgttaatgcaggttgcgtaatattgagtaatttagcagcattgttaaatgaactggactctgccagtatgacaaatgccttcatacttgataattcatgcttcattattactccggaaaatggaagcgacgattttgggtgactggcagttaaaaattttaactgcatttagccaacttaaattaatgaaaaaatgttattaatcgttgagctaaagtcattagagatgctttgcccttaatgtaaccatatcgcaataagttatgtttttaaattgagggcattattatgaaaaaaataccctgcgtgatgatgcgaggtggaacctcgaggggcgcgttcctgttagcggaacatctacccgaagatcaaacgcagcgcgataaaatattgatggcaattatgggttccggtaacgatctggaaattgacggtattggcggcggtaatccgctgaccagtaaagtcgccattattagccgctccagcgatccgcgtgcagatgtcgattatctgtttgctcaagttatcgtccatgagcaacgtgtcgataccacgcctaactgcggcaatatgctgtctggcgttggggcattcgccattgaaaatggtttgattgcagcgacttcgccagttacccgcgtacgtatccgcaacgtcaatacgggtacgtttatcgaagctgatgtgcaaacgccaaatggtgttgtcgagtacgagggtagcgccagaattgacggcgtaccgggtactgccgcaccggttgcgctcactttcctgaatgccgccggaacgaaaaccggaaaagtcttcccgactgataatcagattgattattttgacgatgtcccggtgacctgtatcgatatggcgatgccagttgtcattattcctgctgaatatctgggaaaaacaggctatgaattaccggcagagctggatgccgacaaagcattattagcccgcattgaatctatccgtctacaagcgggtaaagcaatgggcttaggcgatgtcagtaatatggttatccctaaacctgtacttatttctccagcgcagaaaggcggggcaattaatgtgcgttattttatgccgcattcttgccatcgcgctttggcgataaccggtgctattgctatttccagtagttgtgcattggaaggtaccgtcacccgacaaatcgtcccttctgtaggatacggcaatatcaatattgaacaccccagtggtgcgctcgacgttcatttaagtaatgaaggtcaggatgccacgacgttacgcgcatctgttattcggacgaccagaaaaatattttccggtgaagtttatcttccctgaaaaattttgttgtcgtgataatgatactcaataaaggaattctgtatgagtcatacagaaagaacaggatattaaatgaataaaaaatcgttatggaagctaattctgatattagcgatcccatgtattattggctttatgccagctccggcaggattaagcgaactggcgtgggtgctttttggtatttacctggcggccattgtggggctggttatcaagcctttcccggaacctgtcgtactgttaattgccgtcgccgcatcgatggtagtggtgggtaacttatcaggtggggaatttaaaaccaccgccgtattaagcggttactcttccggtaccacctggctggtgttttctgcgtttactttaagcgccgcgtttgtaaccacaggcttaggtaaacgtattgcctatctgctgattggtaaaattggtagcactaccctgggtctgggttacgttacggtatttctcgatctggtactggctccggcaacaccgtctaacaccgcgcgtgcgggcggcatcgtgttaccgatcatcaacagcgtggcagtggctttgggatcagaaccggaaaaaagtccgcgtcgtgttggacattacctgatgatgtccatttacatggtcactaaaaccaccagctatatgttctttaccgcaatggcggggaacattctggcgctgaaaatgatcaacgacattctgcacctgcaaattagctggggtggatgggcgctagccgccggattgccgggcatcattatgctgctggtcaccccgctggtgatttacaccatgtatccaccagaaattaagaaggtggataacaaaaccatcgctaaagcgggccttgccgaactgggaccgatgaaaatccgcgaaaaaatgctgctcggtgtctttgtgctggcgctgctgggctggattttcagtaagtctctgggggttgatgaatccaccgtggcaatcgttgttatggcaactatgctgctgctgggtatcgttacctgggaagacgtggttaaaaataaaggcggctggaataccttaatctggtacggcggtattatcggcttaagctccttattatcgaaagttaaattcttcgaatggttagctgaagtctttaaaaataacctggcatttgatggtcacggtaacgttgctttcttcgttattattttcctcagcatcatcgtgcgttatttcttcgcttctggtagtgcctatatcgttgccatgttaccggtatttgccatgctggcgaatgtctccggcgcaccgttaatgttaaccgcgctggcactgttgttctctaactcctatggcggcatggttactcactatggcggcgcggcaggtccggtcatctttggcgtgggttacaacgatattaaatcctggtggttggtcggtgcggtactgacgatattaaccttcctggtacatatcaccctcggcgtgtggtggtggaatatgctgatcggctggaacatgctgtaaatatactcgtcatacttcaagttgcatgtgctgcgtctgcgttcgctcaccccagtcacttacttatgtaagctcctggggattcactcgcttgtcgccttcctgcaactcgaattatttagagtatatccatttattatctttctgcgcacttcacggtgcgcagatatctggagcatttgatgatcaagttatctgaaaaaggcgtgtttctcgccagcaataacgaaataattgccgaagaacatttcaccggcgaaataaaaaaagaagaagcaaaaaaaggcactattgcctggtctattctctcttctcataatacgtccggaaatatggataaacttaaaattaagtttgattcattagcctctcacgatattacctttgttggtattgtacagaccgctaaagcgtccggtatggaacgtttcccgctgccgtatgtgctgaccaactgccataactcactctgtgctgtgggcggcaccattaacggtgatgaccatgtttttggtttatcggcggcccagcgttatggcggtatttttgtgccaccgcatattgcggtcatccatcaatatatgcgtgaaatgatggcgggcggcggcaaaatgatcctcgggtcagacagccatacccgttacggtgcgttagggacaatggcggttggcgagggcggcggcgagttggtaaaacagctgcttaatgacacctgggatatcgactatccgggcgtggttgcggtgcatctgaccggaaaacctgcgccgtatgtggggccgcaggatgtggcgctggctatcatcggtgctgtgttcaaaaacggttacgtcaaaaacaaagtgatggagttcgtaggtcccggtgttgcagcgctctctaccgatttccgtaacagcgttgacgtgatgaccactgaaacgacctgtttaagttctgtctggcaaaccgatgaagaagtccataactggctggcgctgcacggtcgcggccaggattactgccaacttaaccctcaaccaatggcgtactacgatggctgcatcagcgttgatttaagcgccatcaaaccaatgattgcgctgccattccacccgagcaatgtgtatgaaatcgacacgctgaaccagaacctgaccgacattctgcgtgagattgaaattgagtccgaacgcgtggcgcacggtaaagccaaactctcgctgctggataaagtggaaaatggtcgcctgaaagtgcagcaggggattatcgcgggctgttctggcggtaactacgaaaacgtcatcgcggcggcgaatgcgctgcgcggtcaatcctgcggcaatgacaccttctcgttagcggtttacccgtcatcacagccggtgtttatggatctcgccaaaaaaggtgtggtagcagatttgatcggcgcaggcgcaatcatcagaaccgcgttctgcggcccatgctttggcgcgggcgatacgccaatcaacaacggtttgagtattcgccacaccacgcgtaacttcccgaaccgcgaaggctctaagccagctaatgggcagatgtcagcggtggcgttgatggacgctcgttctatcgctgcgactgcggcaaacggtggctatttaacctctgccagcgaactcgattgctgggacaacgtgccggagtacgccttcgatgtaacgccgtataaaaaccgtgtttatcagggctttgtgaaaggggcgacccagcaaccgctgatttacggaccgaacattaaagactggccagaattgggtgcgctgactgacaatatcgtcctcaaagtgtgctcgaagatcctcgacgaagtgaccaccaccgacgaactgattccttccggtgaaacctcttcatatcgttcaaatccgattggtctggcggagtttactctgtcacgccgcgatccaggttatgttggcagaagtaaagcgactgctgagctggaaaatcagcgtctggcgggaaatgtcagcgagctgacagaggtgtttgcgcgcattaagcagattgctggtcaggagcatattgatccgctgcaaactgaaattggcagtatggtctatgcggtgaaaccaggcgatggttctgcgcgtgaacaggcggcgagttgtcagcgtgtgattggcggtctggcgaatattgccgaggagtacgtgactaaacgctatcgttctaacgtcatcaactgggggatgttaccgctgcagatggcggaagcgccaacctttgaagtgggggattacatttacatccctggcattaaagcggcgctggataatcctggaacgacgtttaaaggttatgtgatccatgaagatgcaccggtaacggagattacgctctatatggaaagtctgactgctgaagagcgcgagattatcaaggcaggtagtttgattaacttcaataaaaaccgtcagatgtaaaaagcgccatgtgaatgtaggtcgcatccgcagttattgtcggatgcgatgccgacgcatcttatccgaccgacaaatcgtatcgaactgtaggccggataaggcgtttacgccgcatccggcacatagttaacagctcctacttcttcgcctctgcaaccactttgctacccacgccgcggttattgtattcccacatgcggttgtagttagtgtcattcagattgcgctgtacttcgtcgttatcatcaacgctgccggtgttacccgcaaatggacgattagagatcaccgcatcagcccacggtttggctgtgttaaaaccttcgttgatggcgctatcacggatcactacctgaccgttggtattggcatcaacatccagcgagcggcccagttgcgccacgccatcaccggaagcattgaaacggctgtttacggcgaggaaaccgtagtaaatgttggacagcgtagccggtgcaaacacatacgcttcttgctgggtacgggagttcaccacgcggaattcggtgttatcgaacaccactgcgccgcgaccagaaacgatatccacatccccttcaatatagctgttggtcaccagcgtacgtggctgacgattcgtttccagacggttctgcacaccgctgttggtgacaaagaaggtgttctgacgaccgagaatgttgacgttattgatctgcactttgtcgccatcagtacgcagtgccaccgccggatggttacccgcatctacgctatcgcccagcgtgttttcgatggtcaggttttgcagttgcaggccattgttttgtgaccagaagaccgcagagcagagaacaccgatactgtcgctgcgtttactctggcagctatcgtacatataccacgccggtttacctggcatatatttgccgcgcgggttgacgtcgtgacgccagtcggcagggctcatgccaccatcaagggaaagcccaatcttcacatcaatcggtttttcacccgtaccgtacagagtaattccacccggagcggcagggacatacaccgttccctgatactcaccaggcatcacggcaatatactggcgcttgttggtacgcttgataattgccgcatctaccgccgcctgaatcgtggtatgcgttacaccttgagtacccgccgggccgacaacaaagtcaggttgcgcaggcagggtaatcggggaaggattccacgctgccgcacctggtgtcagggatgcaaaatagtgttgagcatcgaaattctgcgcttcttttgccgacagaatcgggcgcgaagaggtaccaggcgcggtttgatcagaaggacgttgatcgggcggtgttgagctacaggcggtcagcgtcacgccaaaagccaatgccagcgccagacgggaaactgaaaatgtgttcacaggttgctccgggctatgaaatagaaaaatgaatccgttgaagcctgcttttttatactaacttgagcgaaacgggaaggtaaaaagacaaaaagttgtttttaatacctttaagtgataccagatggcattgcgccatctggcagagtgattaactaaacatcgcagtaatcgaggcactcgccagagagtgaaaatgaacgttaaacccgaccatcgcgccgctggcaccttcatcgacatcaatacgttctacatccagcgcgtgaacggtaaaaatgtagcgatgggtttcgcctttcggcggcgctgcgccatcgtacccggttttaccaaagtcggtacgcgtctgcaaaacgccgtctggcatagctaccagaccagagccaaacccttgcggtaatacgcgggtatcagcgggtaaattaacaactacccagtgccaccagccggagccggttggcgcatccgggtcatagcaggtgacaacaaaacttttcgttcccacaggaacatcatcccacgccagatgcggtgaaatattatcgccatcgtaacccatgccgttaaagacatgacgatgcggcagcttatcgccatcgcgcagatcgttactgatgagtttcattagaatgcctccgggaaacctcggccttcagaccggggaggaaaggaggcggttttccgactaactgtactttgcataatcacattttcctctttagtatgtgaacacatgaaacgcgcatataaataccggttttacccgacaactgagcaggctgagcttttagctcagacgtttggctgtgtgcgcttcgtctacaattccatccttcgttggcgtaccgatgcgtactacgagcgaaaagaaaagatcggttatctacaggccaacgctcgccttacggcgctcaaaaaagagcctgaatacatatggctgaatgatgtttcctgcgttcccctccagcagtcgttgcgccaccaacaagccgcctttgctaacttctttgccggacgagctgcatatccggctttcaaaagcaaacggcacaaacaggtggctgagttcactgccagcgcgtttaaacaccgtgacggcgagttgtatatagcaaagagcaagtcgccgctggatgttcgctggagtcgagaattaccatctgcgccgtcaaccgttaccatttccagagatagcgctggcaggtactttgtttcctgcctgtgtgagtttgaacctgtatcaatgcctgttaccgctaaaacggtcggcattgatgtgggcttaaaagatttattcgtcaccgataccggattcaaaaccgacaatccccgccacaccgctaaatatgcgaagcgattaacgctgctacagcgacgtttaagcaggaagcaaaaaggctcaagaaaccgtattaaagcccgcttaaaggtcgcccgactccacgcgaaaatcgccgattgccggatggacaatctgcacaagttgtcccgcaaactgattaacgaaaaccaagttgtttgcgtcgaatccctcaaggtgaaaaacatgatccgcaacccgaagctgtctaaagcaatagctgacgcaggctggagcgaacttgttcgccagctccagtacaaaggcaaatgggccgggcggtcagtggtcgccattgaccagtatttaccgtcctcaaaatgctgtagttgctgcggtttcaccatgcaaaaaatgcctcttaatgttcgtaaatggcactgccctgaatgcggcgcagaccatgatcgcgacattaacgcggcacgtaatattaaagctgccgggctggcagtgttagcccacggagagcctgtaaaccctgaatcgcagcacgcggcttaggttcggctcgttgaagtgggaatccccgtcattcagggcggggagccgtcaagagccctcctttcttgtttgcagaaagtgtagccagaaaccctcacgctgacttcccgttattggcaaaaaaatgtttcatcctgcaccgcacggttaaccgctgcggtcagacgctgcaactgttgcgggagaataatatagggcggcatcaggtaaatcagtttgccaaaaggccggatccagacaccctgttcgacaaagaatttttgcagcgctgccatattcaccggacgagtggtttcgaccacgccgattgcccccagtacgcgcacatcggcaaccatttcggcgtcacaggcgggggcaagttgctcgcgtagctgcgcttcaatagccgccacctgatgctgccagtcgccagattcaagaatcgccaggctggcgtttgctgctgcgcaggccagcggattgcccataaaagttggcccatgcataaagcagccggcttcgccgttactgatggtttccgcaacctcgcgcgtggtgagcgtggcggaaagggtcattgtgccgccggttaaggctttaccgagacacaaaatatccggcgcgatttctgcatgttcacaggcaaacagtttgccggtacgaccaaatccggtggcgatctcgtcggcaatcagcaagataccttcgcgatcgcacattttgcggattcgttttaaccattccggatggtacatgcgcatcccgcctgcgccctggacaatcggttcaatgatcaccgccgcgatttcatgacgatgcgctgccatcaggcgggcaaagcccaccatatcacgctcatcccattcgccatccatgcggctttgcggggcgggagcaaacaggttttctggcagatagcctttccacaggctgtgcattgagttgtccggatcgcacaccgacatcgcgccaaaggtatcgccatgataaccattgcggaaggttagaaaacgctggcgcgcttcgcctttggcctgccagtactgcaacgccattttcatcgccacttctaccgctacggagccggagtccgcgagaaaaacgcactccagcggttgcggcgtcattgccaccaatttgcggcacagctcaatggcgggcgcatgggtgataccgccaaacatcacatgcgacatagcatcaatttgcgacttcatcgccgcattaagctgcgggtgattgtaaccgtggatcgccgcccaccaggacgacataccgtcaaccaggcgtctgccgtcagacaaaattagctcgcaaccttcggcgcttgccaccggataaaccggcagcggggaggtcatggatgtgtatgggtgccagatatggcgttggtcaaaggtaagatcgtccgttgtcataatcgacttgtaaaccaaattgaaaagatttaggtttacgagtctacaccgaattaacaacaaaaaacacgttttggagaagccccatggctcaccgcccacgctggacattgtcgcaagtcacagaattatttgaaaaaccgttgctggatctgctgtttgaagcgcagcaggtgcatcgtcagcatttcgatcctcgtcaggtgcaggtcagcactttgctgtcgattaagaccggagcttgtccggaagattgcaaatattgcccgcaaagctcgcgctacaaaaccgggctggaagccgagcggttgatggaagttgaacaggtgctggagtcggcgcgcaaagcgaaagcggcgggatcgacgcgtttctgtatgggcgcggcgtggaagaatccccacgaacgcgatatgccgtacctggaacaaatggtgcagggggtaaaagcgatgggtctggaggcgtgtatgacgctgggcacgttgagtgaatctcaagcgcagcgcctggcgaatgccgggctggattactataaccacaacctcgacacctcgccggagttttacggcaatatcatcaccacccgcacctatcaggaacgtcttgatacgctggaaaaagtgcgagaagctgggattaaagtctgttcaggtggcattgtgggcttaggcgaaacggtgaaagatcgcgccggattattgctgcaactggcaaacttgccgacgccgccggaaagcgtgccaatcaacatgctggtgaaggtgaaaggcacgccgctggcggataacgacgatgtcgatgcctttgattttatccgtaccattgccgtagcgcggatcatgatgccgacctcttacgtacgcctttctgccggacgcgagcagatgaacgaacagactcaggcgatgtgctttatggctggcgcaaactcgattttctacggttgcaaactgctgactacgccgaatccggaagaagataaagacctgcaactgttccgcaaactggggctaaatccgcagcaaactgccgtgctggcgggcgataacgaacaacagcagcgtctggagcaggcgctgatgaccccggacactgacgaatattacaacgcggcagcactatgatctggcaggagaaaatcgacgcggcgcttgatgcgcggcgtgttgctgatgccttgcgtcgccgttatccggtggcacaaggagccggacgctggctggtggcagatgattgccagtatctgaacttttccagtaacgattatttaggtttaagccatcatccgcaaattatccgcgcctggcagcagggcgcggatcaatttggtgtcggtagcggcggttccggtcacgtcagcggttatagcgtggcgcaccaggtgctggaagaagaactggccgaatggctgggctattcgcgggcgctgctgtttatttctggttttgccgctaatcaggctgtcattgccgcgatgatggcgaaagaggaccgtattgttgccgatcggcttagccatgcctcattgctggaggctgcaagtttaagcccgtcgccgcttcgccgttttgctcataacgatgtcactcatctggcgcgactgcttgcttccccctgtccggggcagcaactggtagtgacagaaggtgtgttcagcatggacggcgatagtgcgccactggaggaaatccagcaggtaacgcaacagcacgatggctggttgatggtcgatgacgcccacggcacgggcgttatcggggagcaggggcgtggcagctgctggctgcaaaaggtaaaaccagaattgctggtggtgacgtttggcaaaggatttggcgtcagcggggcagcggtgctttgctccaatacggtggcggattatctgctgcaattcgctcgccatcttatctacagcaccagtatgccgcccgctcaggcgcaggcattacgtgcgtcgctggcggtcattcgcagtgatgagggggatgcacggcgcgaaaaactggcggcactcattactcgttttcgtgccggagtgcaggatttgccgtttacgcttgctgactcatggagcgccatccagccattgatcgtcggtgataacagccgtgcgttacaactggcagaaaaactgcgccagcaaggctgctgggtcacggcgattcgcccgccaaccgtacccgctggtactgcgcgactgcgcttaacgctaaccgcagcgcatgaaatgcaggatatcgaccgtctgctggaggtgctgcatggcaacggttaataaacaagccattgctgcggcatttggacgggcagccgcacactatgagcaacatgccgatctacagcgccagagtgctgacgccttactggcaatgctcccacagcgtaaatacacccacgtactggatgcgggttgtggaccaggctggatgagccgccgctggcgagagcgtcacgcgcaggtgactgcgttagatctctctccgccaatgcttgttcaggcacgccagaaggatgccgcagaccattatctggcgggagatatcgaatccctgccgttagcgactgcgacgttcgatcttgcatggagcaatctcgcggtgcagtggtgcggtaatttatccatggcactccgcgagctgtatcgggtggtgcgccccggaggcgtggtcgcgtttaccacgctggtgcagggatcgttacccgaactgcatcaggcgtggcaggcggtggacgagcgcccgcatgctaatcgctttttaccgccagataaaatcgaacagtcgctaaacgccgtgcattatcaacattatattcagcccatcacgctgtggtttgatgatgcgctcagtgccatgcgttcgctgaaaggcatcggtgccacgcatcttcatgaagggcgtgacccgcgaatattaacgcgttcgcagttgcagcgattgcaactagcctggccgcaacaacaggggcgatatcctctgacgtatcatctttttttgggagtgattgctcgtgagtaaatgttattttgtcaccggaacggataccgaagtggggaaaactgtcgccagctgcgcgcttttacaagccgcaaaggcagcaggctaccggacggcaggttataaaccggtggcctctggcagcgaaaagaccccgaaaggcttacgtaatagtgacgcgctggcgttacagcgcaacagtagcctgcagctggattacgcaacggtaaatccttacaccttcgcagaacccacctcgccgcatatcatcagcgcgcaagagggcaggccgatagaagcattggtaatgagcgccggattacgcgcgcttgaacaacaggctgactgggtgttagtggaaggtgctggcggctggtttacgccgctttctgacactttcacttttgcggattgggtaacacaggaacaactgccagtgatactggttgtgggcgtgaaactcggctgtattaatcacgcgatgttgactgcgcaggcaatactacacgccggactgactctggcggggtgggtggcgaacgatgtcacgcctccgggaaaacgtcacgctgaatatatgaccacgctcacccgcatgattcccgcgccgctgctgggcgaaattccctggcttgcagaaaatccagaaaatgcggcaaccggaaagtacatcaatcttgccttaatgtagtcatcctgtgcttggttaaattgtgagcgagatcgcgtctccgattgactgcaatttaaccaattaaattctaaaaaaatcacgaaaaaaattttacctccgcatcatgcggtgaatgtgggaattgcccaggcggcgggggataggggctgcagacagttatccactattcctgtggataaccatgtgtattagagttagaaaacacgaggcaagcgagagaatacgcggcttgcacgcaaattggcgttaaagacggctcaaagaaatatcttttattttttaacaggttagataattgcaatggcagtcactgaacaggcatctcttgccataaaactgtcatcaatcatcttgacaaatgttaaaaaagccgttgctttggggataacccggtaaggccggagttttatctcgccgcagagtaaatcttgttcatgattgacagcggagtttacgctgtaacagaaatattatggtgatgaactgtttttttatccagtataatttgttggcataattaagtacgacgagtaaaattacatacctgcccgcccaactccttcaggtagcgactcatgagtaaaccgttcaaactgaattccgcttttaaaccttctggcgatcagccggaggcgattcgacgtctcgaagaggggctggaagatggcctggcgcaccagacgttacttggcgtgactggctccgggaaaaccttcaccattgccaatgtcattgctgaccttcagcgcccaaccatggtacttgcgcccaacaaaacgctggcggcccagctgtatggcgaaatgaaagaattctttccggaaaacgcggtggaatatttcgtctcctactacgactactatcagccggaggcctatgtaccgagttccgacaccttcattgagaaagatgcctcggtaaacgaacatatcgaacagatgcgtttgtccgccaccaaagcgatgctggagcggcgtgatgtggttgtggtggcgtctgtttccgcgatttatggtctgggcgatcctgatttatatctcaagatgatgctccatctcacggtcggtatgattatcgatcagcgcgcgatcctgcgccgactggcggagctgcaatatgctcgtaatgatcaagcattccagcgtggtactttccgtgttcgtggcgaggtgattgatatcttcccggcagaatcggatgacattgcacttcgcgtggagctgtttgacgaggaggtggaacgattgtcgttatttgacccgctgaccgggcagattgtttccactattccacgttttaccatctacccgaaaacgcactacgtcacgccacgcgagcgcatcgtccaggcgatggaggagatcaaagaagagctggccgccagacgtaaagtgctattggaaaacaacaaactgatggaagagcagcggctgacccagcgtacccagtttgatctggagatgatgaacgagctaggctactgttcggggattgagaactactcgcgcttcctctccggtcgtggaccgggtgagccaccgccgacgctgtttgattacctgcctgctgatgggctgctggtggtcgatgaatctcacgtcaccattccacaaattggcggcatgtatcgcggtgaccgggcgcgtaaagagacactggtggagtacggcttccgcctgccatcagcgctggataaccgtccgctgaaatttgaagagttcgaagcattagcgccgcaaaccatctatgtttcggcgacgccgggtaattacgagctggaaaaatccggtggcgatgtggtggatcaggtggtgcgtccaacaggcttactcgacccgattatcgaagtgcggccagtggcaacacaggtggatgatcttctttcggagattcgtcagcgagcggcaattaacgaacgcgtactggttacaactctgaccaagcggatggcggaagatctcactgaatatctcgaagaacacggtgagcgcgtgcgttatcttcactcagatatcgacaccgtcgaacgtatggagattatccgcgacttgcgtctgggtgagttcgacgtattggtagggatcaacttactgcgcgaaggtctggatatgccggaagtttcgctggtggcgatcctcgacgctgacaaagaaggcttcctgcgttccgaacgttcgttgatccagaccattggtcgtgcggcacgtaacgttaacggtaaagcgattctctacggcgataagatcaccccatcaatggcgaaagcgattggcgaaaccgaacgtcgccgcgagaaacagcagaagtacaacgaagaacacggcattacgccgcaaggcttgaacaagaaagtggtcgatatcctggcgctggggcagaacattgccaaaaccaaagcgaagggcagaggaaaatcgcgcccgattgttgaaccggataatgtgccgatggatatgtcgcctaaagcgttacagcagaagatccatgaactggaagggttgatgatgcaacacgcgcagaatctggagttcgaagaagcggcgcaaattcgtgaccagttgcatcagttgcgtgagctgtttattgccgcgtcgtgacaagatgacgaagccggaatattcttccggcttcgtgttaacctaaagcctgtaatgccttttccagcgcgctatgcaacaactggcggtcatgacgatacggaatatcgctggcctccagcacttcctgaatcacaatccgctctttcaccgccgagacatccactttgggcccgacgatgaccgcatcaattacctttttaccaacatattgctccataattgccagcttgctttccagcttcagattagccgcaggtaaactcaattcacgccccagattgccgatatagaccatcggcgctggcgtgcggcgtaatgcctgtgcgatttccttcagcagcagaattggcatcaggctggtgtaaaaactgccaggcccaataatgatgagatccgcttcactgatagcgtgaaccgcctcacgcgttgcgggtacattcggcgttaacaataactcttgaatcggcgtagttaactggtcgatattgacctcgccgtaaacttcatgcccctgatcgtcaatcgccatcagatcaacaggatgctccgacatcggaatcaaatgtgcgtccactttcagcagatttcgaatcagattgatcgcttcaagaggtcgcacgctaaggtgatccagtgccttcagcatcaggtttccaaggttgtgtccggaaagttcgccattaccgccgaaacgatattcaaacattgcggaagcgacgctgggttcagttatcagctggttgaggcagttacgcatatcgccccaggcaataccgccttctgagcggcgaatacgccccgtcgagccaccgttatcggtggtggtgacgatacccgttaaacgagaacccaaagacgaaagtgatgagagaacgcgtcccagtccatgccctccgccgagagcaacgacacgatcaagatcagccagcgtacgattgcgcatatagtttcctggagtcagattatccgcgctacagtagcgcaaattgcgaggaaacagcaattaacctgccaatattgaggatacaaactattttcttctacctctaaaggacgatgcacgctatgcctccctgatgatgtatatcaaagtaaaaccgccattttcccttattctgtagcgaaatagcacgatcatgacgctatatacatgattacatagcgaaagtgtggatggtaaaaatctcatttacacgctagtatcggcttaaccactaaacactctagcctctgcacctgggtcaactgatacggtgctttggccgtgacaatgctcgtaaagattgccaccagggcgaaggaagaaatgacttcgcctcccgtatctggaaaggtgtacatggcttcacaactgactgatgcatttgcgcgtaagttttactacttgcgcctgtcgattactgatgtgtgtaactttcgttgcacctactgcctgccggatggttacaagccgagcggcgtcaccaataaaggctttctgaccgtcgatgaaattcgccgggttacgcgcgccttcgccagtctgggcaccgaaaaagtccgtctgacaggtggtgagccatctttacgccgcgactttaccgatatcatcgccgctgtgcgagaaaacgacgctattcgccagatagcggtcaccaccaatggttaccgtctggagcgcgatgtggcgaactggcgcgatgctggacttactggcatcaacgtcagcgtcgacagtctggacgctcgccagtttcatgccattaccgggcaggataaattcaaccaggtcatggcaggaatcgatgctgcatttgaggccggttttgagaaggtcaaagtcaataccgtgctgatgcgtgatgttaatcatcaccagctcgacacctttctgaactggatccagcatcgtcccatccagctgcgtttcatcgaactgatggaaacgggcgagggcagcgagctcttccgtaagcatcacatctctggtcaggttctgcgtgacgagctactgcgtcgcggctggatccaccaattacgtcaacgcagcgacggtcccgcgcaagtcttttgtcatccggattacgccggagagattggccttatcatgccgtatgaaaaagacttctgcgccacttgcaaccgcctgcgcgtttcctccattggtaaactccatctctgcctgtttggtgaaggcggcgttaacctgcgcgatctgctggaagacgatacccagcaacaggcgctggaagcgcgtatttcagcggcgctgcgggagaaaaaacagacccatttcctgcatcaaaataacaccggtattacgcaaaacttatcgtacattggtggctaaaacgtcaaaaggagagatcagatgagtcaggtaagcactgaatttatcccgacccgtattgctattcttacggtttctaatcgtcgcggtgaagaagacgatacctccggtcactatctgcgcgactcggcgcaagaagcgggccatcacgttgtcgataaagccattgtgaaagaaaaccgctacgctattcgcgctcaggtatctgcgtggatcgccagcgacgatgtacaagtggtgttgattacgggtggtactggcctgacggaaggagatcaggctcccgaagcgctgctgccgttgttcgaccgtgaaattgaaggttttggtgaagtgttccggatgttgtcgttcgaagagattggcacttccacgttgcaatctcgtgcggtagcgggcgtcgctaacaaaacgctgattttcgccatgccgggttcgaccaaagcgtgccgtaccgcatgggaaaatatcattgcgccgcagctggatgcccgtacgcgtccgtgtaatttccatccacatttgaagaaataagtatgtcgcaactgacccatatcaacgccgctggcgaagcgcacatggtggatgtctccgccaaagcggaaaccgtgcgtgaagcgcgcgccgaagcctttgtcaccatgcgcagcgagacgctggcgatgattattgatggtcgccaccacaaaggcgacgtatttgccactgcgcgtatcgccggtattcaggcggcaaaacgcacctgggatctgatcccgctgtgtcacccgctgatgctcagcaaagttgaagtcaatttacaggccgagccggagcacaatcgggtacgtatagaaaccttatgccgcctgaccgggaaaaccggtgtcgaaatggaagcgttaaccgcggcctccgtggcggcgctgaccatttatgacatgtgcaaagcggtgcaaaaagatatggtgattggtccggtacgtttgctggcgaagagcggcggcaagtcgggtgactttaaggtggaagcggatgattaacgttctttttttcgcccaggtgcgcgagttggtgggaacagatgcaaccgaagtggctgcggatttcccaaccgttgaagcgttacgccaacatctggctgcgcagagcgatcgctgggcgctggcgctggaagatggcaaattgctggctgctgtcaaccagacgctggtgagttttgaccattcgctgactgacggcgacgaagtggctttcttcccgccggtaaccggaggttaagatggcagaaaccaaaattgttgtcggcccgcagccgttcagcgtaggagaagagtacccgtggctggctgagcgtgacgaagacggtgcggtagtcacctttaccggtaaggtgcgcaaccataacctgggcgacagcgtcaaagcattaaccctcgaacactatccgggaatgacagaaaaagcactggcagaaatcgttgatgaagcgcgtaaccgctggccgctggggcgcgtcacggtaattcaccgcattggtgaattatggccgggcgatgaaattgtttttgtcggtgttaccagtgcgcatcgcagcagtgcgtttgaagccgggcagtttattatggattatctcaaaacccgcgcaccgttctggaagcgcgaagccacgccggaaggcgaccgttgggtcgaagctcgggagagcgatcagcaggcggcaaaacgctggtagtttattgttagccggataaggcaccgctgcgtccggcaatttcaccgctcagtacatgcgtttacgctgcgtcgatgcacagcctcatcattttgcagtatccttaagatattccttatatcttcaggagaaagtcatggacagattcccacgttctgattcaattgtacaaccccgggctggcttgcaaacttatatggcgcaagtctatggctggatgaccgttggcttgttgctgaccgcatttgttgcctggtatgcggctaactccgcggccgtgatggagctgttgttcactaaccgtgtctttttaatcggtctgatcatcgcgcaattagcattggttattgtgttatcagcgatgattcaaaagctgagcgcaggtgtgacgacgatgctctttatgctttattcggcgctgacgggtcttacgctttccagtattttcattgtctataccgctgcttctatcgccagtactttcgtcgttactgccgggatgtttggcgcaatgagcctgtacggttacaccacgaagcgcgatctaagcggctttggcaatatgctgtttatggcgttaatcggcattgtgttggcatcgctggtcaacttctggctgaaaagcgaagcattgatgtgggcagttacctacatcggcgtgattgtctttgtcggattgacggcgtatgacactcagaaattgaaaaatatgggtgagcagattgatacccgcgacacgtcgaacctgcgcaaatattccattcttggcgcgttaaccttgtatctggacttcatcaacctgttcctgatgttgctgcggatcttcggcaaccgccgttaattctttttcaccatcaatatcccggccatgtgtcgggattttttttcttactaaaaacgacacttaacaagtaccaggtataaaatatgccttatggacgagcggaagcgttttctgtatccataaatgcaaaagtattttgtatgcgtggttttaaatttattgatggtgaatattaatgttttttctaaggacaactaaaagaatggaatcatactcgcaaaatagcaataaattagattttcagcacgaagccaggatattaaacagcatatggctcattaccgctttgggtttggtggcaaccgcagggctggcctggggcgctaagtatctcgaaattacggcaacaaaatatgattcaccgcaaatgtatgttgctataggattattattactttctatgtatggcttgagtaaagatatcaacaagataaataccgccatcgcgggcgtaatatatttgtttttaatctctttggtggcgattgtcgttgcgagtttagcgcctgtatctgccattatcgtcgtgttcagcactgcgggatcgatgtttttaatcagtatgctggcaggtctattgtttaaatttgatcctggttctcaccgttttatcattatgatgacgttgacagggttggccctggtaatcatcgtgaatgccacattaatgagtgaacgacccatttgggtaataagttgcttaatgattgtcttatggtcaggcattatctcgcatggacgaaataagctccttgaactgacaggaaaaagccatagtgaagaattatggagttcggttcgttgtgcttttataggtgcattaacactctattactattttatcggcttctttgggattcttgccgctatagctataacgcttgtctggcaaaggcatacgcggttttttcattagccgtaaatgcacatactaaagaacttaactatacttcacatcgccgcttcatttttcgcccgtagcttcttcgcctggctttccagcaacaggtaacagatcagcgccagcagcagtgggataaagtaatacagcacacggtaagcgagcagggcggcgataattgtgcctttggaggtatgctccccagccagtagcgcgataaacaccgcttccagcacaccaattcccgccggaatatgcacgatgacgccagcaatactactaaccagcaacacgcccagtacaaagaaatagttcacgctttgaccaagtaacagccagataatcgctcccattaccatccagttaacgctggaaatcagcatctgggtgagggcgaatttccacgaaggcagcaccagcttttgccctttgatggtcatatggcggtgcttcgcgaaagcgcaaaaccacaaataaaccgcgataatcatcagtaagccaataccgagaatacgcagcgtagtttgatcgacataccagtgatccggcaactccaccacgcctgcggtaaagataacccccgctagcaaaatatagcctagccagttggtggtaatactgagcgaaaaaatccgcgtaatagtgctgcccggtaaccccagtcgggagtacaaacgatagcgcataccaatgccgccgacccaggtactgagtgtcaggttgaaggcgtagcagataaacgacaccagcatcacctggcgcttcgccagtttgtgaccgcagtagaaacgggcgagcaggtcgtagcaaccgtaaatcagataactgacgaccaccagcccgaccgcactaagcagcgcaacgcgattgtagtcgcggatgaccttccagacctcttcccagtccacttttttggcgtagaccaccagcaacacaatcaccgcgataaaaaacagccaggtgaggagtttctttgctaagcgccagcgcgggtgtgatttactcatcagggttttacccccgtgttttcagtttctacccgatcctgcgtttccattgtcggttgtgcggggggaccaacctgcgccagacgtggcgtgtgcgccggaagccagcccaccagcgccgggaagtggcgtaaaaagtggaacgccagcacgcttttggtcaggttccaccaggtgcgtttcggcagcatggtctcatcgacctgctgacaatctgcggcgataatgccgttcagattatcgcgcagcgtctggttaaaattacgatcgtggatgatgacatttgcttcgagattcagtgacaaactgagcggatcgagattactggaccctactgtcgcccagtgatcgtccatcaatgccactttgccgtggagcgggcggcggcggtactcaaacacctgaacgccgcctttaaccagatagttatacagcaaacgtgcgccgactctgacaatcggcatatccggttcgccctgaatgatcagtttgatccgcaccccgcgccgtgccgctttacgcaaggcgtgtaaaaaacgatagccggggaagaagtaggcgttggcgataatcacttcccgccgcgcctgagtgagcattttcagatagtgacgttcgatatcatcgcgatgttcttcgttatcgcgccagaccagcaatacctgcgcttctcccggctggcggttctcttccgctttatgatgacgtcgccaccagcgtcgcgccgcgctctgtcctggcaggttttccagctcaaactggagaatatcttcgacaatcggcccttcgaggcgaaccgcgtaatcctgtttggcctccgggccgtagctggacatatgctcggcggagtaattcagcccgccaataaaggcgatacgcgcgtcgatcaccacaattttgcgatgcatccggcgaaacacattggtgcgcataccaaaaaggcgagggcggggatcgtagtagcggaacaccacgccagctgccgtcagttcattgacaaactcatcgctgagatccggcgaaccgtagccatccagcaagacttccgcttttaccccgcgttgcgctgctgccaatagcgccgcatgcagctgtttgccgacgtcatcctcaaaccagataaacgtttcaagaatgatgcgttcttgcgcctcgccaatcgccttaaacaccgcgggataatattgctcgccgttttccagcaactggatcttattgccttcgcgccagctacatttcataaatgaatctccgcacttaaaggggcatgatcagaaaggtgtcgccatgtccgcagcggcaacgcggttggcgcgctggcgctggcatttttgacgtagatcctgtccagtcgtagtagaggaaattgcaccggaaacgtgcgcgccgggcgtccgtgggcgcgggtaaaaatctcatccagcccggcctgcacttttaacggatgattagctttttgccgccagtcgttgaaatcacccgctaccaataccggttcgccgtccggtagctcattcacccattcggcgagcatcgcaagctgcgcctgacggtgcgcctcacgcaggcccagatgtacgcacatcacatgaatcgctttcccggtcatcggcggcacaatgcggcagtagagcacgccgcgcttttccgcaccatcgaccgaaacatcacgattctcataatgttcaatgggataacgtgaaagaacggcgttaccgtgatgtccttccgggtatacggcattgcgaccgtaggcgaaatcgctccacatggtgtcggcgagaaactcgtagtgcgaggtatcgggccagttttccacatgcagcggatgaacttcgtgcgcgcccatcacttcctgcaggcaaacaatatcggcgctgacggtacgcacggcgtcgcgaagttccggcaaaatgaagcgtcggttaaacgcggtaaagcctttgtgaatattgatggtgagcaccttgaacgaaaattgttgtgtttgatcgggcataattttcctgtctttgcctcttatctcattgaaatagtgtagtcggcgtcacaaaaaggtgcggtcttacggaattttccgtaaagttcggtactctgaataagtagagataaattcttcaggagagaagccatgaagtggcaacaacgtgttcgtgtcgcaactggcctaagttgctggcagattatgttgcatttactggtagtggcgctgctggtggtgggctggatgagtaaaactctggttcacgtcggcgtaggattatgcgcactgtattgtgtcacggtagtgatgatgctggtgtttcagcgccaccccgagcaacgctggcgtgaggtggcagacgtgctggaagagctgaccacgacctggtattttggtgcagcgctgattgtgctgtggctgttgtcccgcgtactggaaaacaactttttgctggcaattgcagggctggcaatccttgccggcccggcggtggtgtctttgctggcgaaagataagaagttacatcaccttacgtctaaacatcgcgtacgccgctgaccctgtcgtggccgttatcaccagtagcggccacaaactattccacacaatatccagactcgcatccttcaaataaatctgcttggtaatgtccgtaaagtggcgaatagggttaatccacgtcagattttgcagccacattggcatgttttccaccggcgaaacgtaaccggaaaggagaatggcgggcatcataaagacaaacacgccgataaacgcctgctgttgtgttgaacagagtgatgaaatcaacagaccgaatcccaccagtgataaaccgtaaaccaccatcgtaaagtagaacagcgccagcgatccggcgaagggaatttgatacgcccagataccaatcgccagcacaatggtggcctggaaggtggcgacaattaatgccggtacggctttgccgatgaatatctgccaggtggtgagcggcgaaaccagtaactgatcgagcgtaccttgttcacgttcgcgggcgacggaaagtgaagtgacgatcattacgccgatagtggtgatcatggcgatcagcgacggcaccacaaaccatttgtagtcgagattcgggttataccagttgcgtaccaccagctcgctgttgttgggtttcggttttccttccagcagctcctgctgataatttttgacgatctgttgcaggtagttggcggcaatttgcgcactgttggagttacgcccgtctaggatcaactgtaacggcgcggtctggaaggtatccagtttgcgcgagaagtcagccgggaaacgcaccagtagtaacgccttttgtgtgtcgatggtcgggcggatctcctgcgggcttttcagcagcagcacatgggtaaaggcgctggcgcgggcaaaacgttgagtaagttccaccgaatgctcgccgttatcttcatcgtagatggcgatggtggcgttggtcacttccagcgtggcggcgaacgggaacaggatcacctgaatcagcacgggtaaaatcagaattgcgcgggtttgcggttcgcgcagcagcgactgcaactctttgcggattaacgtccataagcgatgaaacatgctcttctccctaatccagccgacgtttggttttcagccacgtcaggccgataaacatcaccgccgaagcgatcaaaaacagcacgttcaccaccagtaccaccggaatattcccggcgaggaacaggctttgcagggtgctgacgaaataacgtgcgggaataatgtacgtcaccgcgcggatcaccgcgggcatactgtctatctgaaatataaagccggaaagcataatcgacggcagaaaagccgcgttcagggcgacctgagcggcattgaactggttgcgggtaatcgtggaaatcagcagccccattcccagggtactgagtaaaaacaggctggagataaaaaacagaatcagcagcgacccgcgatacggcacgccgagaataaacaccgacaccagcatacacagcaacatcgccagcatcccgagaaagtaataagggatcagcttacacagcagcagttccgtgcgggtaatctctgtggagagtaacgcctccatggtgccgcgttcccattctcgcgccaccaccagcgaggtgaggatcgcgccgatgaccgtcatgataatggtcaccgcaccggggataataaagtgctggcttattgccgccgggttaaaccagtagcgggtttgtacatcaataagcggttcaaaagtctgcccgttgtcctccgctcgctgcatttgccagatctgccagatcccttcgacatacccctgcacaaagttagcggtattcggctcactgccgtcggtgatcacctgaatcggtgcggtggcgttggcgcgctccatctgttcggcgaaatccacgggaataaccaccagaccgcgaattttccccgcctgcattttggcgatcagttcctgacggttatcgctgatggtggcgtcgatgtagggcgaaccggtcatggtgtgggtgaaatccagcgccgcttcgctacgctgttccagtaaaatcccgacgcgcagcttgctggagtcgaggttaatgccgtatccaaaaataaacagcagtagcagtgggatcactaccgcaatcagccagctactcggatcgcgaacaatctgccgcgtctctttgacgcacagcgcccgcacgcgacgccaggacaggatcggattactcattgctatgctccttatcccagtcgtggatcaactgaataaaggcttgctccatcgtgggatcgggttgctcatcgttggccgactgcgctttcaaatcgtccggtgtgccgctggcgattaatttcccgcggtacaccaggccgatgcggtcgcaatattccgcttcatccataaagtgggtggtgaccatcaccgtgacgcctttctctaccatactgttgatatgtagccaaaattcacggcgggtgaggggatcaacgccggacgtcggttcgtcgagaaacagaatgtccggttcatgcatcagcgaacaggccagcgccagccgctgtttaaaacctaatggcagttcatcggtcgcgtgggaggcgatacttttcaggccgaacgcctcgctcatacgggagattttttcgttctgcgcccgaccgcgtaagccatacacaccagagaaaaagcgtaaattctgttcgaccgtcaggttgccgtagagcgaaaatttttgcgccatatagccgagatgctggcgcgctttaccggaactctctttcagatccatgcccagcaccagcgcctgaccagaggtcggtaccagcaaaccgcacatcatcttaaaggtggtcgatttacccgcgccgtttggtcccagtaaaccaaaaatctccccgcgtttaacggcaaagttgacgtgatcggtggcggcaaaatcaccaaatttcttggttagttccttcgcttcgatcaccgtctcgccaggtgtacctcctaccgtatgtaatattgcgcccagcggcgattccgaggttccggcaccgcccagcaaatcaataaatgcatcttcaaaacgcggcgtagtttcgttaatgttgatttccggcatcccgtcggcatggcgaatatcgtctggtgtagcctcttttttgaggatcagacgtaccgatttcccctgaatcatgccgtcgctgacctgcggcagtttcaatgcccgttgcaacagtttgcggttgccctcgtgcgggctggtcatcagaaagctgcgtccggccatggtttgagtcagggccgtcggttctccctgatacagcagctcgccttcgttcatcagtaacacgtcacggcactgctcggcttcgtcgagatacgaggtactccagaggattaacatcccttcgcccgccagctcatgcaccatctgccacagttcgcgccgtgagatagggtcaacgccgacgccgggttcatcgagcagcaacactttcggttcgcctaccagggtacaggccaggccgagtttttgtttcatcccaccggagagcttgcccgccaggcgtccggtaaacgggccaagagatgtaaactccagcaggcgagcaaaagtctgcttccgtgcctcgccggtgacgctgcgcaaatccgcgtacagattgaggttctccatcaccgtcagatcttcatacaggccgaatttctgcggcatatagccgagcacggcgtgcagcgcgccgtcgtttttgatcggatcaaagccaatcaccgtggcactgccgctgtcgggtttcagtaatcccgccagcatccgcatcagcgtggttttgcccgcaccgtccggcccaaccagccccgtcacataaccggcgtgaatggtgcagtcgagcggtgcgacggcgggcttgtccatgcccggaaagcgtttttccaggccgttcagcgtgataacggcatcattcatgtcctgcctcgtcaccgaattgcaccgttaccggcattccctggcgtaacgcatcatcggcgtcggtcaccacaatacgcaggcgatagacgaggtcggtacgcagatccggtgtttcgacggttttcggggtaaattcagcagtcggcgaaacgaaaccaatctgcccgtgatacggtttgttcggacgaccatcggtataaagcagcactttgcgccccggctgggcctggtcaagattacgttcatcaacataggcgcgtacccacaccggacgcgtcagcgagacggtaaataccgtgccaccttcattaagcaccgtgcctggctctaccgcgcgcgttaacagcgtgccatcagacggagcgaccagcgtcgaatcctgcaaattcagctccgcctgcgccagttgcgcctgcgcttgttcgaggctggctttcgcctgggcgatgtcctgttcgcggttaccggaacggtactgacgcaatttatcctgcgctgatttcagcgtggcctgcgcctggtcgcgcgaggagcgggcattttccagatcatttgccgaaatggtgcggcttttccacagtccttgctggcggttatagaagttctgcgcatagtcataggcagcttgcgcctgtttcaccgctgcggcggcctgagcgatttcttcgtcgcgatacccggcaagcatcaggtcatactgcgcctgagccaccgaaacgcccgctttcgcctgcatcagggcaatctcatacggcttgtgatccagttcgcccagcacctggcccgctttgatcgcatcaccttcgtccaccgccagcgactcaacgcgccccccaacacggaaactaagattcaccgtacgaatatccacgttgccatacagcgtcaggccgttatcctggcggctttgataccaccagtagcctccggcaaccacggcggcaagtactactaccgccagtccgatcacgacaggttttttcatcactacaaactcctttgcgataatccttgcaaaatcaggtcaatatgacaggtcaccgtctggttaatcagttcggtcttttcttcatcgaacgcggtccagccggtacgtaacaaaatggtttctttgccaagacgaaatgccagaatctcaccaatcaacgcatgggtatgaaggatcatgcgggtgtcattggcgtcgcagccggtcctggcggcaatcaggcgtgtaaggtggctgtgtagcggactaattacctgttcgtgcaccaggtgataggctgccgtgggagagagctgctcacgggagataaatttgctgaggttgacggtgtcatcctgggtgagcagcttaatcatgttcttgcaggcgcgaaggatcagttcgcggatggcagcccgatccggctgtggttgtgcgaacaagcgttcggcttcttcagcgtgcggacggaactgctcgccaataaaatcggcaatccactgggcgcaggcgagatacaaatcttctttcgaaccgaagtagtaggtgatggcagcgatattctgcccggcctgggcggctatctcgcgggtggtggcgttcattccatattcaccaaactgtgccagtgccgcagcaatcagctgttttttcgcctgttcacccttgattgtcatggcaggattattcatcgcacagtccattcttaatcaaatgattgattaagattatgactccataggggagttgtccagtatggctaagaattttagctacgccagtcacagggataatttatgcgctgcgtcacaaaaactgctacactccgctccctcatgacattgtggtttttgtcattttccttttcagtatctccctgaaaactacaccggtaacggtcggggcggttcggagtagttatgtctttcgattctttgggtttaagccctgatatcctgcgcgccgttgccgagcagggttaccgtgaacccacccctattcagcagcaggcgatccctgcggtgctggaaggccgcgacctgatggccagcgcccagaccggtaccggcaaaacagcgggctttacgctgccgttgttgcaacacctgatcactcgccagccgcacgccaaagggcgtcgtccggtacgcgcgctcattcttaccccgacccgtgaactggcggcgcagattggcgaaaacgtccgtgattacagcaaatatctgaacattcgttcgctggtggtgtttggcggtgtcagcattaacccacaaatgatgaagttgcgcggcggcgttgatgtgctggtggcaacgccgggacgtctgctggacctggaacatcaaaatgcagtgaagctggatcaggttgaaatcctcgtccttgatgaagctgaccgcatgctcgacatgggctttatccacgatatccgtcgcgtgttaacaaaactgccagcgaagcgccagaacctgttgttctccgcgaccttctctgacgatattaaagccctggcggaaaaactgttgcacaacccgctggaaatcgaagtggcacgccgcaatactgcgtctgatcaggtgacccagcacgttcactttgtcgataagaaacgcaaacgcgaattgctgtcgcatatgattgggaaagggaactggcagcaggtgctggtgtttacccgtaccaaacatggcgctaaccatctggctgaacagcttaataaagatggcatccgtagtgcggcgatccacggtaataaatcgcaaggtgcgcgtactcgtgcgctggccgattttaaatcgggcgatattcgtgtactggtggcaactgacatcgctgcgcgcggcctggatatcgaagagttgccgcacgtcgtcaactatgagttaccaaacgtaccggaagattatgttcaccgtatcgggcgtactggccgtgcggcggcaactggcgaagcattgtcgctggtgtgtgttgatgaacacaaactgctgcgtgatatcgaaaaactgctgaaaaaagagatcccgcgcattgcgattccggggtatgagccggacccgtcaatcaaagccgaaccgatccagaacggtcgccagcaacgtggcggcggtcgtggacagggcggtggtcgcggtcaacagcaaccacgccgtgcggaaagtggtgcgaagtctggtaacgcgaagcccgcagaaaaaccgtctcgtcgtctcggcgatgccaaaccggcaggcgaacaacaacgtcgccgccgtccgcgtaaacctgccgctgcgcagtaatcttttatgccgggctatgcccggcatgagactgatgacaaacacaaaactgcctgatgcgctacgcttatcaggcctacgtgaactctgcaatatattgaatgtgcatgtttttgtaggccggataaggcgctcgcgccgcatccggcatttcacaacaagcacttgtcagccatttgcgagcgcggcaaaaagatttctctgttttaacgcccacaagccacccgatgcgttacttctccgcagccaattgtccgcgcaacgccattaaaaggtaccccaggcgattcttgccctgaccattaccgccatctccccagtaagcatcattttgcgtatgctcaaccagttttgcggacgcggttgccagcaagagtgtacgcagttctgcatgttgttcgaatttagcgcgaagcgctttacgcatcatcctgctggttattgcgagccgctttccagaaacagaaaaaccattacccctgaaaaccgaaaaatgccacaatattggctgtttatacagtatttcaggttttctcatggcattaaccgccgcgcttaaagcgcaaattgccgcctggtataaggcgcttcaggaacagatccccgactttattccccgtgcgccgcagcggcagatgattgcggacgtcgccaaaacgctggccggagaagaagggcggcatctggcgattgaagcccctaccggcgttgggaaaacgctctcctatttgatccccggcatcgccattgcccgcgaagagcaaaaaacgctggtggtaagtaccgccaacgtggcattgcaggatcagatctacagcaaagatttaccgctgctgaaaaagatcattcccgatcttaaattcactgccgcttttgggcgtgggcgctacgtttgcccgcgtaatctgacagcgctcgccagcactgagcccacgcaacaggatctgctggcgtttcttgacgacgaactgacgccgaacaatcaggaagagcaaaaacgttgtgcgaagctgaagggcgatctcgacacttataaatgggatggcctgcgcgatcatactgatatcgctatagatgatgatctctggcgtcgtttgagtaccgacaaagccagctgcctcaaccgcaactgttactactatcgcgaatgcccgttttttgtcgctcgtcgggaaattcaggaagcggaagtggtggtggcaaaccatgcgctggtgatggcggcgatggaaagcgaagcggtattgcctgacccgaaaaatttactgctggtgctggacgaaggtcatcacctgccggatgtggcgcgggatgcgctggagatgagcgccgaaatcactgcgccctggtaccggctccaactggacctgttcaccaaactggtcgccacctgcatggagcagtttcgcccgaagaccatcccaccgctggcgatccctgaacgtttgaatgcgcattgtgaagagctgtatgagcttatcgcctcgttaaacaacattctcaatctctacatgcctgccgggcaggaggcagagcaccgttttgcgatgggcgaactgcctgatgaagtgctggagatctgccagcggctggcaaaactcaccgagatgctgcgtggtctggcggagttatttcttaacgatttaagtgagaaaaccggcagccatgacattgtacgcctgcatcggttgattttgcagatgaaccgcgcgttggggatgttcgaggcgcaaagcaaactctggcggctggcgtctctggcgcaatcttccggtgcgccggtgaccaaatgggcgacgcgggaagagcgcgaagggcagctacatctgtggtttcactgtgtgggtattcgtgttagcgaccaactggaaaggctgctgtggcgcagtattccgcacattattgttacctccgcaaccttgcgttcgctgaacagtttttcgcgtttgcaggagatgagtgggctgaaagagaaagcgggcgaccgttttgtggcactggattccccctttaaccactgtgaacagggcaaaattgttattccccggatgcgcgttgagccttccatcgacaacgaagagcagcacattgctgaaatggcggcctttttccgtgagcaggtggagagcaaaaaacatctcggtatgttggtgctgtttgccagcgggcgtgcgatgcagcgctttctcgactatgtgacggatttacgcctgatgttgctggtgcagggcgatcagccacgttatcgcttagttgaactgcaccgcaaacgcgttgccaacggtgagcgtagcgtgctggtgggcttacagtcctttgccgaaggtcttgatctgaaaggcgatctgctcagccaggtgcatatccacaagatcgcttttccgcccatcgacagcccggtggtgatcaccgaaggtgaatggctgaaaagcctcaaccgctatccgtttgaggtgcaaagcctgccgagcgcttcgtttaacctgattcagcaggttgggcgactgattcgaagccacggttgctggggggaagtggttatctacgacaaacgcttgctgacaaaaaattatggcaagcgactactggatgcattaccggtatttccgatagagcaaccggaagtccctgaaggtatagttaaaaagaaagaaaaaacgaaatccccacgccgtcggcggcgttaatgatgtgagtcaggtaaggagtcgtaaatggactatcgcaaaatcattaaagagatcgggcgcgggaaaaaccacgcgcgcgatttagaccgggatactgcgcgcggtctgtatgcccatatgctcaatagtgaagtccctgaccttgagttgggcggcgtattgattgcgctacgtatcaaaggggaaggggaagcagagatgctcggcttttacgaagccatgcaaaatcacaccatcaagctgacgccgcctgcaggcaagccgatgccgattgtcatccccagttacaacggcgcgcgtaaacaggccaacctgacgccgttgttggcgattctcctgcacaaactcggttttcccgtggtggttcacggggttagcgaagatccaacccgcgtgctgacagaaaccattttcgaactgatgggtattacgccaacgttgcacggcgggcaggcgcaggcgaagctcgacgaacatcaaccggtgtttatgcctgtcggcgcgttttgcccgccgctggaaaaacaactggcgatgcgctggcggatgggcgtgcgtaacagtgcacataccctggcgaaactggcgacgccatttgccgaaggtgaggcactgcgtctttccagcgtttcgcatccggaatacattggacgcgtcgcgaagttctttagtgatatcggcgggcgggcgctactaatgcatggtactgaaggtgaagtgtatgctaatccgcagcgctgcccgcagatcaatctcattgaccgtgaagggatgcgggtactgtatgaaaaacaggacactgctggtagcgagttactgccacaagcaaaagatccggaaaccacggcgcagtggattgagcgttgccttgctggcagcgaaccgattcccgaatcgctgaaaatccagatggcttgctgcctgatggctacgggtgaagcggcaactatcagcgacggcctggcgcgcgttaatcaggcattttaatttttatctcagccggatgagccatgtcatccggcttttaccccaccgcaatatgaaattcctgcatctttattgaccttcccgcgcccggcgtgcagcataaaaaaacaacaaacacataacataaacaggagttaaccatggtaagtggtcatcgctttgatgctcagacgctgcacagttttattcaggctgtatttcgtcagatgggtagtgaggaacaagaagcgaaattagtcgccgatcatttaatcgcggcaaacctggcagggcatgattcacatggtattggcatgatcccaagctatgtgcgctcctggagtcaggggcatctgcaaattaaccatcatgccaaagtcgttaaagaagcgggggcggcggtcacgctcgatggcgatcgcgcatttggtcaggtcgcggcacacgaagcgatggcgctggggattgagaaagcgcgtcagcacggcattgccgccgtggcgctacataactcgcatcatatcggtcgtatcggttactgggcagaacagtgcgcggcggcggggtttgtctctatccactttgttagcgtggtcggtattccaatggtcgcgccgttccacggtcgcgacagccgctttggcaccaatccgttctgtgtggttttccctcgtaaagataatttcccgctgttgctcgattacgccaccagcgccattgcatttggcaaaacccgcgtcgcctggcataaaggcgtccccgtgccgccaggttgcctgattgacgttaacggcgtgccgacgacaaatccggcggtaatgcaggagtcgccgttgggttcgctgttgacctttgccgaacataaaggctacgcccttgcagcgatgtgtgaaattcttggcggggcgctttctggcggtaaaacgacgcatcaggaaacgttacaaaccagtcctgatgccattcttaactgcatgactactatcattatcaacccggaactgttcggcgcgccggattgtagtgcacagaccgaagcctttgccgagtgggtgaaagcctcgccgcatgatgaagataaaccgattttgctaccgggcgagtgggaagtgaacacgcgtcgcgaacggcaggagcaggggattccactggatgcgggaagctggcaggccatttgtgatgcagcgcggcagattggtatgccggaagagacgttgcaggctttctgtcagcagttagccagctaaaaaaagcccgtccagtggcggacgggcaaacaagggtaacataggatcaatgagggttagagcatatgcgtctgtcggcaaacagacagggaaatacttgtgctgaacgtagcgtaaacgcctgatccagccaacggttcggattttgtaggtctgataagacgcggtagcgtcgcatcaggcatctgttgccggatgcggcgtaaacgccttatccgtcctacgaattacttataaattaccgcagtaccgcttaatttattgttgttggtggcagaagtgatgctgtatccactggcaccggccgccgcggctttctcagccagtttcgcttccagggcatcgagggtggatgcgccatcggcagaaaccacgccgattttattcatgttctgtgcctgggatgccgttaccggttccgccgcgaacacaccaaatgacagagttgaaagagccatagcagcaacaacagtattgatagttttcataattaatctctcgcaggtgatttttgtataagtgacgttgtttcgtcgatgtgatgagtatcacgtttttttacgagagataaaatcgaagagaattgaccgccttgttcaaataaattgattgatatctaacatactgataaaccatttatttgttgtatttatgaatccgttttgtaccgcgtggtgctcacggcagcgttaaaggcacggaatgccacgcaaaatacaaattacactcactaaacatcccgtcagttgcagttaacgtaactggctgtctttcgaacctctgcgattatatcctgtataagctggtttttgtaaatctttctcctgttggcaatgaatgcataagcgcacgccaggaatggcttcccgacgggcctgcgggataggggcaccgcactcttcacattcatacaggctttcgccacgcggaatttcaccccgagcgcgggcaatcgcatcttcaattgtactgttgatctgttcgttgacggcgtcatcattagcccaaccggatgccatatcgtcctccccatatcaatgcttgtacagttaagtgtagctaatatagggacgaactcgggcagttcaagcgtcagatctccgaccattcccgcagcagattatgataaagattgagcagcgacaggatctcttcactttcgccgtagtggcttttcagcgactgaatattgttgtccagttcaaacagcatggcgcgctttttatcatcgcggatcatcgactggatccacataaatgatgccactcgcacgccgcgggttacgggtgtcacgcaatgcaggctgctggagggatacaacaccagatcgcctgccgggagttttacccgatgttgcccgaaggtgtcattaacgaccagttcgccgccgtcgtagctttctggatcgcttaaaaacagcgtggcagaaaggtcagtgcgcatccagccgttttgtggatggctgcgtactgcgccatccacatgaaaaccataggtttcattgttctgatagcgattaaacagcggcgtggaaagggtacgcggcaaggccgcggcaaagaacaaagcatgttggttaaccgcgttcagcacctcattttgcagggcggcgtacagggcgctgcgggtgtctacttgttgattgttcttaacttgcgcaccttgtgcgccggtggtgacgcgcccatccacccattcggcttgttccaggtgttcgcgaaaacgggcgacgtcctgtggcgataacacgccgggaatgtggtacatcatacaagttctccaaaaagtggggcctgcgccccacaccgatttttaacagcaggcaatggtgctcaggtgccggatgcggcgtgaacgccttatccggcctaccaaatgatgtgaattcagtgtattgcacaaccttgtaggcctgataagcgcagcgcatcaggcagtcctgctctcgccatcaacattagtgagccttgcgccccacatctgaatcagaaatgcatattagctgtgagcaagaaggttcttggctcgcccgggtgataacggtagccgctcttattgattgaggcgacgtaatcggtatcaaacaggttgtagacgtttagctggaagtcgagattgcgattaacccgataccccagtttggcgtcggcgacccaataaccttcggtaaatgctggcgtccccaccgcgccgtctgaacctttatgcatactgccgatataccgtgcgcccgcaccaacagaaatatcatcggttgcctgatactggctccataaggtgaaggcgtgttccggggtatacggcagcgatgaggaaccatcctgggcaacatctttgccgtttttgatagttgctttttgctgggtatagccgccaatcatctgccatgcgggggtgatattcccggccacggatatctcgtagccttcgacacgtttcttaccatattgcgaataagtcccgtcatcattttgctcaacttcattttcaatatcagtacggaacagcgcggcggtaagtagcaggcgtttatccagaacctgccatttggtgccaatctcgctggtgttggctttttgtggtttaaaatcggtgcggttggcactgttaccgctgccagactgcgcaagggcgaagttgttgccgcccggcggctgctgggaaacggcatagttaatatagacattgccgttttccgtcaggtgatacagcgccccggctttccagttcaccagattgcccgacttggcggtgtcgacggtggtgaccggagaaccttttgccacgccagcagggcaggtgatggcaccgcgcccgctgccgccgcaggcggtagcactgtcatattcagtatgataattatccagacggatcccgccgttcagctcaaaatcacgggtgatttgcagcgtatcgaaggcataaattgcgaaggtatccgtctgaccattggcgtttgcgccgttgcgcgtcaggccgccgggatgaatgctgctgtcaggatgataaatatttaccgccggtaacgtcaccggattaacgccatagttagtctgtgtttcgcgggtaaattccacgccggtactgagatcatgaccgatagcgccggtatagaacgtcgaggtcaggttggtctggttggtgagaattttgttactcacatctttggtattcgccgtgcgtgaccacgtccagctattcacatcgctggtgggctgggtaatattcgacgctccacccataatcgccgtcatcaggtaatcctgctttacgcgcgaccaacgcgtagtgttgcgaatggtggtgttatcgttgatgtcgtgctcaaaacgcatggtagcggtgtcggtggtcgaatcgtcgtaatcggaatctgtgccgtaaaagttatgagtatcaacttttccggaatgattcagggctgctgttcccgcagatggggcagaataacccggtaaaccgatggtcggaatgccgccgtctggcgtgttgtgctgggtgacatgcagataattaagatacaaacgattcgctgtaccaaggccaaaaacgacagaaggggcgacgccgtaacgctcatttttgactttgtcgcgtccggcatcgtgcgttttttcgcccattacattcaggcgcaccgcagtggtatcaccaatgacctgattgacgtccagcgtgccgcggcggaaccaggcgctgccaatactggcggaggcgtcaatgccggaatcattgcgcggctgtttgctgatcatattgatcgagcctgtcggtgcgctgcgcccgtagtcggtgccggacggccctttaattacttcgacctgctcggtattgaaggtgtcgcgcgagacgctgccgatatcgcgaatgccatcgatataaatactgttagaggtatcggcaccgcgcatataaatggcgtcgccagtggtggagttaccgttctcacccgcaaaaaacgcacccacgccggggacgtttttgagcgcgtcggtaaggttggttgcaccctgatctttaatcacttgttcagaaatcaccgtcatcgtgcgggtagtatccgctaccggacgcgagaatttcggatcggcagattgttgtggcgcataaagcgaaggcgttgatgcttcgacaaccagcgtgtcatccgcgttagcttgcccttcggcagcgagtgcctgtgccacaggcgtaataccaatacaaagaccggcaaagaacgtgagcgaatgaaattgtctggcagggaaattgcgattgttttccattttgcaggtgactttttcttatatggtgaaattttcactgtcacgagaaagcatctctgcggatgcgatgccactgttaatcccgtgatagcgtacgtgcaagtgataataattttgataagcattatcacttggcgcgattttctatcacccattgcgcgaaaaagaaatacatttatttacattgcgttcatatttgatgttttttgcttacaaatcggacgaaaactgcatccagagacgaatgcagttacgttggtggggttatttgtagatgattgcagtaccgaacatctggtcatttccgcctgcggaattaatgacataacctttcgcgccttgttcgcgcgctttttctgccagtttatcctccagatcgcttaggtttgatgcgccagttgccgaaacggtaccggcgggccgtagttgacctctgtccaggttactcatcggttgcgcggcataagccgtgagagagattccgctcaggacggtggcaatcagtagtgtgaggcactttttcataatgacatcctcataaatacaacgggtagtgccagataagtgtaggtcgcctgcgcgatgaaaatgacgtaaaaaattgacagagatgtgcttattttttgaacgatatatttttacaaaataagacaaatcaatgacatgcatgatgatgatttttatggtgaattgccataaaccatagccatgtgaaggtttttagaaatgataaacgcagccagatatttaccctgtcgcgttatgcgggtatcttacgccgctgcttaaaggagaatgctatgtccgcccagaaaccggggttgcatccgcgcaaccgtcatcacagccgctacgatctcgccacgctttgtcaggtcaatcctgaactcaggcaattcctcacgcttacacccgccggggagcaaagcgtagactttgccaatccgctggcggtgaaggcgctcaataaggcgttgctggcccatttttacgccgtagcgaactgggatatcccggacggttttctctgcccaccagtaccgggccgggcggattatattcatcaccttgccgatttactggccgaagcaagcggaacaattccagctaatgccagcattctggatatcggcgttggtgcgaactgtatttatccgctgattggcgtacatgaatatggctggcgttttaccggtagtgaaaccagcagccaggcgttaagcagtgcgcaggcaatcatcagtgctaatccggggcttaaccgcgccattcgtctgcgtcggcaaaaagagagtggggcgatttttaacggcatcatccataaaaacgagcaatacgatgcgaccttgtgtaacccgccattccacaattccgccactgcggcacgggcaggtagtgaacgtaaacgccgtaacctggggctgaacaaagacgatgcactgaactttggtggtcagcaacaggagttgtggtgtgaaggcggtgaagtcgcctttattaaaaagatgattgaagagagcaaaggcttcgcgaagcaggtgatgtggtttacctcgctggtatctcgtggtgaaaacttaccgccgttgtatcgtgctttgacggacgtaggtgcggtgaaggtggtaaaaaaagagatggcccaggggcaaaagcagagccgctttatagcctggacctttatgaacgacgagcagcgccgccgttttgtcaatcgccagcgttaaagcgttggctcccccggcggcaacggttcagccggggccgcgcccggagctggcagcacctgataagtctgtaccggcgcgcgaacacccgccaggtcgaaatgttttttcacctggctgtcgagggcaaagcggaccgtccactgtttgagtggcagcgtggtgaacgaaacacgcagtgtaaacgcggtattgcttaagccgacaatcccggcaaagttcggttcaccaataaccagcccgcgaatttcttcgttttccatcaattctgctaccgcatctttcagtgcctgattggctttatcagcatcttcatggcgatcaacatcgtagtttgccactaccgaaccaataccgcggacgaagttagcaaaggtggttatcgaagaccacggaatgatgtgatacgccccggtatcctggcgcacgcccacggagcgaatcgacatccgttccacagtgccggtcaacggcccgatagtcaccaaatctccagtgttcatgccgttttcaaactgaataaatactccggtaataatatctttcaccagcgtttgcgaaccaaacgagatagccagacctaatgccccggcacctgccagcaatggcgcgatattgacgccgatttccgacaacacaatcatgatggtgatggtactgataatcaccgccagcgcgttacggaacagcgtcagcagggttcgcgtacgggcgctgggtagcgggcggccatgaatatccgaagccagccggttttctatcaaactggcgagcaccgtccagccaaccgccgagaagaaaagaatgagtgcgatacggatcaggatatctacggttttctgccccgctccgttttgcagccagttccagaaatcgaacaatccccatgcgctcaacagcagcattaccgccacgcagactgtcagaatacgcgctgttttcagtgccgccgaaagccatccattcagccgtttttgcagctcgggatagttacgctgagtatgtggcgagagggtgatggttttcgccaaccagcgggaaaacataccggaaacaaatgctgcgataccaataatcgccaggctgcgcaccgttgcacccatcataaatttcaggctgttgcccggatcgaacaacgaaaagaaaaacagcacgataaaataggcgcttgccagccagtgccacaccagcgcaaaggcgcggataaacaggctgaaaaaggccagcgaatgctccgcaaagttgagcaaatgctgggtgatctcttttttattacgaaaaatcaggtacaacgcccagacggtcatgcacagcataatgatgacgttcgccagtgcacctatctgtacattcacctgattagagataatcggcacagccacaatcagaccatagccaatcaggctgcttaaccagctcaggcgacgactccagtaacgggcggtctcgtcatgaatcgtgaacgggcgcagttcagccacgtttgggcaaaaaatcaggcgtagtacggctttgaaaaattcaatcagggcaaaggcgttgagaaacaaactttgttggaaagcgatggtgcgactgcccgcattcaggttgtcgcttaaaacctgaccgacaaataatgtcagtgccagtaacagcaggtcgataataaacgccccgataatcatcgccggaagctgcaaccagttactgcgctcacgatttttttgccgcgcccactggcccattttgcgatacagcggaagtgcgcacaggcgaatcagccagtaaaaaccaaacactaataccgctaacattgaaaaatgggtcaacgcattgctgaaggtttgtggattaaacggcttatgcggggagccggtgatattgcgataaagttgtccgaagcgggcggaaagggcttcaccataatggcggctgacttcggtgactttttgcagcacggtttgctcttcaaccagcgtcggcggcacgatcttcggtacgggttccgcagggggcgtcgcggcgacggtgcgcaactggtcgatcaactctttacgcgaggtgtcattatccagcacatccgccagtgcgccataggccgcttttttttgttcgatatccgattccggggccggttcagtcgttgagtccgttgtcgttgtggttgtaacgccgggtatggataccgcgtgggcaggtgcgcccaacaggcagaagaggatgaacaggatccaccgcatgactcctccagtgagaaaacagagcaaaaagataagtatagatgctggaggctgggcgattttaaatgagaggaatctggtgtgcctccctttcgggggaaagggaggcagagaagttaagagacgtgctgcaaaaattcctgcaagcgctggctcggcgggttcttgatcaacacctgcggatcgccatcttctgcaatccggcctttgtcgataaagatcaggcgcgaagctactttctcggcaaaaccgatttcgtgggtcacgatcaccatcgtcatcccttcttcagccagatcctgcataaccttcagcacttcatggcgcagttccgggtcaagagcggaagtcggttcatcaaacagcatcattttcggcttcaccgccagcgcgcgggcaatcgccacacgctgctgttgaccaccagaaagttcggaagggtagtgatgtgcacgctctgccagaccgactttcgccagcagctcacgcgccagtttttccgcctcttctttgttcgcgccacgcacgcgtagcgggccaaacatgacgttttccagcgccgtcagatgcgggaagaggtaaaactgctggaacaccatacccgcttcctggcgaatcaggcgctcatcaactttcggatcgttaaccttcaggccatcgacaatcagatcgccggaggtgatttcttccagtttgttgatgcagcgcagcagggtcgatttaccggaaccggacggcccgataatcaccacgacttcgccctgagcaatgttcaaatcgatattgtgcagcacctgggttggaccaaaatgcttggagacgtttttaaattcaatcacaggattttcatccttctttccagacgacgcagaataaagctcagcaccagggtaataatcagatagaacaccgccacggcgctccagatctcaagggcgcggaagttaccggcaataatttcttgcccctgacgggtcagttccgccacgccgataacaataaacagcgaagtgtctttaatgctgatgatccactggttacccagcggcggcagcatacgacgcagtgccagcggtaaaatgacgtagcgaatggtttcccaacgtgaaagaccgagcgccagtcctgcttcacgaaaacctttgtgaatagacagcaccgcaccacgcgtgatttccgcaatgtacgcgccggagttgatcatgatggtgaccaccgccgcagtaaacgggtcgatgcgtaaatcgttaaacgccatcggcagggcgaaatagataaacatcacctggacgacgataggtgtgccgcggatcacttcaataaagaccagcgcgacgtggttggctatccaaccaccgaaggtgcgtgcaaaacctgccaacaatccgatcaccagaccgccagccagaccgaggaccgaaatccacagggtcattttggcaccttcaatcagaagcggaatggcaggccagatggcactccagtcaaactgcatatgttgttcctgttaccgtggtgtaaataatcaaattcagggtaattaatggccccggagcgggtttgcgcccttcaccctaatcctctccccggcggggagagggaactgccagtgcgctttacaggcgcagcgttattatttcggttcagtaccgaaccattttttgtagatttcgttgtaagttccgttctcgcgcagggttttcaacgcgccgttgactttgtcacgcagctcgtcgctacctttcgggaacgcaataccgtattgctgtgcttccagagagtcacctaccgctttgaactgaccgttaccggcggttttgatgaagtacagaatgtttggcgtatcgtgcagaacggcgtctgcgcggttggtgcccagttccatataggcgttatcgatgttcgggaactgacgcagatctttagttttgatgtttgctttcgcgtaatcaacggagccagttccgctcttcacagcaaccactttcccgtcgagatctttcacgcttttcacatcgttattgttagctttcaccatcactaacaggccgcttttgtagtagccgtcagagaaatcgatcgcttttttacgctcgtcggtgatggtaatgcccgccagcgccagatcgacgtttttggtttgcagtgccggaatgatcccactgaaatccatcggcttcagttcgtaatccagcttcagttctttagcgatggcagcccacagatcaacgtcaaagcccacgtatttatcgccctgtttaaattcaaacggaacgaaggcagtatccgtcgcgacaactaattttttatccgcggcatgagaagaaaccgcaaaagccagggtcagtgcagccagtgaaacttttaatacagacttcatagcatttccttttttctatccacgggacgatcccctgcgtgacattcacatatatgaaaaaatcgtgccagttttgcaactcattgatttttcgagatgcggcaaaaacgtgatgcacgatttatagggcaataccctgaagatgcaccattctggggcaccaaactggtgcgctaaaattgtgcactcaacacagtgattatttagcgtaaaacatgatgaaaaaacaatctttatgtaacgattgtgtgatgatgtggatacaaaaaatttacttaaccagctggggatagcagatggatgcactaaataagtgcgttgaggcgggctacaaaacaaaacggcctcctgtcaggaagccgcttttatcgtgtactaaagttctgcaccatcagcgatggatttattcgatgttagactcgataaaccacaggaatttatccaggtcgcgagacgcggcggtcaggatatctgcggtgtcgtcatctttcgcttcgtcaatcgctttgcgtacgtcattagcgacgattgcgtaacggtcagccagctctttcaggtgatcctgaacgttgtggatgtccagcgggtaacttttcagcggagttttgctgttgataacttgagtggtccccagagctacaccgcccagctgcactgcacgttctgccatggtatccagatgatcgatcagtgcagtgcggaagccatccagcatttcatgtacggcaatgaagttagcgccgcgcatgttccagtgcgcttgtttggtaatcaaagaaagatcaataaactggataacctggcgattcagcaactctactgttgcttttttctcgctgtcagagacatcgttgcgggtataaagcagattggtcgcttttgatttaactaatttagcggtactcataatttcatatcctcttgatgttatgtcccagtaattaacgagactaagtatagcaccagctatgtgttccgctattctggctgttcctatcacactaatagtggtaacaagcgtgaaaaaacaaaaccaataaaaaactcaatgagttagatatattaataagaacaattcttatttatttgctcgccaggaattttcggaataaatatgcttttgcataattcgatatataaagacggcgtagaggaaaagtagcgagaaaatctgcatggttatgcataaccatgcagaaatgtaaatttaatttatgtctaattcttttattttgctctctttgcgtactgtcagcgtagaacccattgaagcggcgatgatagcgccgagcgccagcagctgtatgggtgtcagtgtttctccgaggaaaatcatcccggaaacggcagccagcgcaggttccatgctcattagcgtaccaaatgtgcgtgttggcaaacgggtgagggcaatcatttccagcgaataaggcagagcggtcgagagaatagcgacagccagacccaatggaataaccgaccagtgccagagtgcttcaccagcctgaagcgctccaattggcacgaaaattaacgctgcaatcaacgaaccaattgccaccgtcgcagggccatgttccgctcctgcgcgttgcccacttaaaatgtaaatagcccaacaagccccggcccccagtgccagcgcacagccggttaaatcgacatgggaaacgtcttgccccagcggtagcaggaaccacagaccaagaaccgccagcacaacccagacgaaatctaccgggcgacgagaagagaacagtgccaccgccagtggtccggtgaactccagcgccaccgcaatacccagcggtaccgtctgaatagaaagataaaaaagataattcattccacccagcgaaacgccgtaaaacaacagcggtaatcgttgctctttggcaaagcgcagtcgccatggcttaaagaacgcgatgaggatcagcgtgcctaatgccagacgcagcgcagtgacccccggtgcgcccaccagaggaaaaagtgacttagctaacgaggctccaccctgaatagacgccatggcaacgagcaatatgactattggtaaccagaccggcattttacgtaatgaaccaggcatcctttctcccacaaatatctaaacctaagtaaagcgtggagtgtactggatatacccaatgctggttgagcatttgttgaaaaaattttcccccgttttgactaaaatgcgccaggattgatggaatcattagtctggtgattaggaataatctggatgaatgacagggaaaacatgcgtaatacttacgcagttctctgaaaaagtgatttaaatttagatggatagcggtgtatggaaacgttctgttacatgaaatggcccgttagacatcataaatcgcgaagagtttcccattaatttttgatatatttaaaacttaggacttatttgaatcacatttgaggtggttatgaaaaaaattgcatgtctttcagcactggccgcagttctggctttcaccgcaggtacttccgtagctgcgacttctaccgtaactggcggttacgcacaaagcgacgctcagggccaaatgaacaaaatgggcggtttcaacctgaaataccgctatgaagaagacaacagcccgctgggtgtgatcggttctttcacttacaccgagaaaagccgtactgcaagctctggtgactacaacaaaaaccagtactacggcatcactgctggtccggcttaccgcattaacgactgggcaagcatctacggtgtagtgggtgtgggttatggtaaattccagaccactgaatacccgacctacaaacacgacaccagcgactacggtttctcctacggtgctggtttgcagttcaacccgatggaaaacgttgctctggacttctcttacgagcagagccgtattcgtagcgttgacgtaggcacctggattgccggtgttggttaccgcttctaatcacttcggtgatataaaaaatccgcctctcggggcggatttttttgttttaaggtttcgggtcgaaaatatcggttccgagatggttgtaatccaccttctgtaactggaagttggtgatgtatatcggcccggctttcttctcagatataaacgggtatttgatatttatttccttcgctttaattcccgtccactgcgagaaaaagcctaagaagtcattggccgagcggcgggctttaatcacccgatgcgctttatcgtcgctggaaatgaccataaaaggcacctggaaattttgctgatacttatcatcatgggcaaggtattgcacgtctttgccgcgctctttaaaggccagaccgtggtcggaaaagtaaaccagcgagaagctgctgccgctgttgcgtaactgatcgtacagcttgcgcagtaaatcgtctgtttgcgtcatggtatagagatagcacgacgtttctttcgattgcacaaaggtttcgtatttgccttgtgtccggtcgcaggcctgcggatgcgagcccatcagatgtagaacaatcagctgcggttgcgagtgctcttgcgccagcacttgagcggtcatatccagtaacgcttcgtctttcgtgtttttatctgcttcaaaattaccttctttcaggaagtacacttcatctgctcgtttggcgatgctggcgatggcggtatcgtattcgccgatttgaccctggttggaaaaccaccaggtctggaagcccgcgcgatttgccagggtgacaaagttatcctgaaactgtggtttgccatcgacaacgcgattgagcgttaagccaagcgatttctgcgtggagccactggcggcaatgtagtcagcaaatatcaaaccgttaacgctgctggcaaacggggtattgtcccagtgaccgccaaaggcaccgagggcatcgcgacgcgcgctttctccgatcaccaccacataggtctgatacttcggcttaacggcagtgaccgtccaggtatctttcattccggaaagttttgccatccgttcttgctcttcaatcacctcgttattattgacgatgacatccttagcaaaacgaaataccggatagccagtatctttcagtttaaatacgccgccccaggccaggttttgcacgggagcaacaaaaaatgtcgccacactgaataccaggcacaggctgtcgaaggtattccagcgcgctttttcactctctttttttcgcctgattgctattacgccgagcgcaaaaataaatatgccgaccaggtagctgtaccacggaaaaatcgtcaggatttcggtcgactcttccatattggtggagtgcaatgccagcaatgtattgaagttaggcgcgccgtaggcctgagcaaaagggaaataacaagccgccaccagcgaactgataccgaccagaactttttgtacgcgaggcaatgttcgccatagcaaaagcaaaatagccgtaaacgcagcggtgtagagcaaactgaaggggtaacctaagccgaggttaattaatagcgactgtaaaaagtagaacgcagtccacgggctaaatacccggctacgggtaacaagcgattctttgagggttaaattcatatgccactatcgtaacaaacgccatgtgcttaccctggcgtcaagggtcaatacctgcaagagtgcgtgaagaggggaaaggggtccgcatccgcgagccgcaatatacgcagggctgcaagaagatagagcgagctgctgttcaggtcaactaccgacgaacaaatcttttgcgaaggggattgcaaatccgacaaaaagtggggtttttcagaccaaaacgcgttgtgcctgcataaaagcaggagtgaagcggcgtaccgcgacgccgctatttatcggaaggtttatcctgctgcggtttgttgttgaccatatcgcacaacatagagagcagcattaaccgtactttaaagggagaatgactaaacacgcgcatacacctcttgaactcattcataagacctcctgacttgctaatcccatcgatccttgaggaatgattgcattacatacagatatagcacaggctatattatatagctattgctaaaacgttaattttttgtaccttcgcaactctggtttacaatgtgcgcacgaaatgagaacgctatgtatgcgtcaccataatgaggaagcacaatgagtcgtcgcgcaggtacgccaacagcaaaaaaagtgacgcagttagtgaacgtggaagagcacgttgaagggttccgccaggtcagagaggcgcatcggcgcgagctgattgatgattacgttgagctgatttctgacttgatcagggaagtgggggaagctcgtcaggtggacatggctgctcgtctgggggtttcgcaaccgacggtggctaaaatgcttaagcgactggcaaccatggggctgattgaaatgatcccctggcgtggcgtgtttttaacggcagaaggagagaagctggcgcaggaaagccgcgagcgacatcagatagtcgaaaatttcttgttggtgttgggcgtcagtccggaaatcgcccgtcgcgacgcggaaggtatggagcaccatgttagtgaagagacgctggatgcctttcgtttgtttacccagaaacacggtgccaaatgagcctgccttttttacgcacgctgcaaggcgatcgtttttttcagttattaattcttgttggcatcggattaagttttttcgttccctttgcaccgaaatcctggcctgctgctatcgactggcacaccatcatcaccttaagcggcctgatgctgctgaccaaaggtgtcgagttaagcggttattttgatgtgctggggcgcaaaatggtgcgccgttttgctacggagcgtcggctggcgatgtttatggtactggcggcagcgctgctttctacctttctgaccaacgatgtcgcactgtttatagttgttccgctgactatcacgctaaaaagactgtgtgagattccggttaatcggctgattatttttgaggcgctggcagtcaacgctggttcgctactgacgccaattggcaacccgcaaaatattcttatctggggacgttctggtctttcgtttgccggatttattgcccaaatggcaccgctggctggcgcaatgatgctgacactcctgctgttgtgctggtgttgtttccctggaaaggcgctgcaataccatacgggggtgcaaacgccggagtggaaaccgcggctggtgtggagttgtctggggctgtatatcgtctttctgacggcgctggagttaaaacaagagctgtggggactggtgattgtggcggcgggctttgcgctgctggcgcgtcgtgtggtgctcagtgtggactggacgctgctgctggtgtttatggcgatgtttatcgacgtccatttactaacccaactgccagttttgcagggggtgttaagtaacgtgagtcatttatccgaacccggattatggttaacggcgatcggtttatcgcaggtgatcagtaacgtgccgagtaccattttgctgctcaattatgtgccaccgtctttattactggcatgggcggtaaacgtggggggctttggtttattacccggatcgctggcaaatttgattgcgttacggatggcgaacgatcgccgtatctggtggcgttttcatctttattcgataccgatgctgttgtgggcggcgctggtgggatatgttttgttggttatgatcccggcgggataaggtctggcaaattaaaaaggcggattatgagtccgcctttgttttacgttttgacgattaattcagacgaaccggcatcccggaacgatttttgatcgcttcatcaagaacaacctggtcaacatctggctgaccggtcactgtctgcacgctcttcgtcagggtaattggcacaatttcctgaccttcaaactgggcttcggtggtagacagcgggttatggacttcaatgtaacggctgccgtctggttcggtagtcgctttcaccggctcatcaataaactgcacgcgagtaccgacaggcactttctcgaacaggaatttaatgtcttcgttacgcagacgcacacagccatgacttacacgcaggccgataccgaagttggcgttggtgccatggatagcgtacaggcgaccgatgtagagtgcatacagacccatcgggttatccggacctgctggaacgacagccggaagcggttcgcccgcagcgcggtactctgcgtgcattttggcggtcggcgtccaggtcgggcctgcttttttacgctcaactttggtggtccagttgataggcgtgtctttgcctaactgaccaatgccgatcggcagcacgataacggtgttggttcctttcggatagtaatacagacgcatctctgcactgttaatgacgatgccttcatgaacggtatccggcaggatcagctgctgcggaatgttcagtacagtaccgcctttcggcaggaaggtatccacacccgggttcgcttccatcatattggaaagtcccatctggtactcggcggcaaaatactccagcggctgagtgttaccttcaggaatggtgatcacctgattctgaccaaccaggcgactcccgtcggttggcagaggataagttaccgcagaggcggtactgcaaaagccgacaacagcgaaggccgctgcgaataatgttttcaatttcatattcatgttaagcgagattttgtgcctggcaggccattgggttgagaatattagagtattggaagcgcattataagttcattccagctcacagtgaaatcagatgtgtacgaaatcacattttttgcctttggcttgagtgtagaccttaagcgaggagcaggatcttctttcagatttatggcataatgcgcggtttgtcatatctcttttcaggatacgcctgtgttagtttccagtaacgtcaccatgcagttcggcagtaagccgttgtttgaaaacatttccgtcaaatttggcggcggcaaccgttacggcctgattggcgcgaacggtagtggtaaatccacctttatgaagatcctcggcggcgacttagagccgacgttgggtaacgtttccctcgatcccaacgagcgcattggtaagctgcgtcaggatcagtttgcctttgaagagttcactgtgctggatacggtgatcatggggcataaagagttgtgggaagtgaagcaggaacgtgaccgcatctatgctttgccggaaatgagtgaagaagacggctataaagtggccgatctggaagtgaaatacggcgaaatggacggttactctgcggaagctcgcgctggtgaactgttgcttggcgtgggaattccagtggaacagcactacggcccgatgagtgaagttgctcctggctggaagctgcgtgtgctgctggcgcaggcgctgtttgctgatccggacattctcctgctcgacgaaccgaccaacaacctcgacatcgacaccattcgctggctggaacaggtgctgaacgagcgtgacagcaccatgatcatcatctcgcacgaccgtcacttccttaacatggtttgtacccacatggcggatctggattacggcgagctgcgcgtttatccgggcaactacgatgagtacatgacggcggcgactcaggcgcgtgaacgtctgctggctgataacgccaagaagaaagcgcagattgctgagttgcaatctttcgttagccgctttagcgccaacgcctcgaaatctcgccaggcaacttcgcgcgcgcgccagattgataaaatcaaactggaagaggtgaaagcctccagccgtcagaacccgttcatccgttttgaacaggataagaaactgttccgtaacgcgctggaagtggaaggtctgactaaagggtttgataacggtccactgtttaaaaatctcaacctgctgctggaagtgggtgaaaaactggcggtactgggtaccaacggcgtcggtaaatcaacgctgctgaaaacgctggtgggcgatctgcaaccggacagcggcaccgtaaaatggtctgagaacgcgcgcattggttactacgcccaggaccatgaatatgagttcgaaaatgatctgaccgtgttcgaatggatgagccagtggaagcaggaaggcgatgacgagcaggcggtacgcagcattctcggtcgtttgctgttcagccaggacgacatcaaaaagcctgcgaaagtgctttccggtggggaaaaagggcggatgctgtttggtaagttaatgatgcagaagccgaacattctgatcatggacgaaccgaccaaccacctggatatggaatccattgagtcgctgaacatggcgctggaactgtatcagggcacgctgatctttgtttctcacgaccgtgagtttgtaagctccctggcgacccgtattctggaaatcaccccggaacgcgtgatcgactttagcggtaattacgaagattacctgcgtagtaaagggatcgagtaagttattatcagtagccctgatatggtcagggctactgaaactgatgacaaacgcaagattgcctggtgcgctacgcttatcagacctggcagtgtatcgcaatatattgaattttcatgattttgtatgccaaataaggcggtcacgccgtatccggcataatgacatgcactttctcaataaactgaattggcgataatcaaagattaaacggcggtttattttccagcaccgcctgaatcacattcagcgtgccttcatgattattatcatcggtagcgtaacgggcgatttgtttaatgttttccgcagcattgctcatcgcaaaggaataacgcgccattttcagcatctccgcatcgttaccgctgtcgccaatcgctaccacattttgcggtgacagatcccagcgtttcagtaaccgcgaaataccgtttgctttatgtagaccgggaataatcaagtcgataaagctaaaaccactggtgacgggtttcataatgccatccagcgctatgtgcagtttgtcgatcactaacgggatttgttcatccggcaggttgagcgaaaacttgaacagtacgtcgtcaatctcctgataatcttttacaggtttcaggcgatggtagtgttttgccatcagtgcgacgaatgcttcgggggcattttcgctgacatatgcactttgcagaccgcaggcgacaaaattgagttgcttatcttttagcaactcgccaataacaatccgcgattcatgtcgggtcagttcgccgtggaacaactgcttgccatgttcgtaaaccagtgcgccgttttccgcgacaaaagagatctcatcctttagctcaggaaagaacgaaataagctggtaatactgattaccgctggcgacaacgaactcaatgccgcgctttttcagttcctgatattgcgccataaaacgtggttggttgtacgttttggcgtcgttaagaaaagtaccgtccatgtctgtgacgataacttttacgctcataggtgtgctcctggctcgaaaatgaaaccgtaacagtgtaataacaatgtgacgcagagcacaaattatatttcgaatgaaagcgaggctgaaattgatgatgtgaatgatttggcccggcgacgacgacgccgggctgaggggattacagcatgtgttcggtacgggcgatgatatcgtcctgtgcgtctggagagagcgcggtgaagaaggcggaataacccgctacgcgtaccaccagatcgcggtattgatccggatgtttcttcgcctccagcaatgtttcgcgggaaacgatgttgtactgaatatgccagcctttatgcacttcaaagaaggtacgcagcaggatcatcagtttctgcttgtcagattcattctccagcgttgccggattcagtttctggttgagcagcacgccgccgagaattgctgccgtaggcagtttacccaccgagccaatgaccgcagtagggccgagatggtcagtaccggaggccggactagcgccttctgccagcggggtatgtgctttacgtccgtccggcgttgccatagtctgcgcgccaaacggtacgttagcggagatagacgatgtgcccgcataatagttgccgccaatcggaccacgaccgtagcgcgggttatggtactgcttcagttcgtcgatataggtctgataagcgcgagccagcagcgtatcgacagtatcatcgtcgttgccgtacttcggcgcaccgttaatcagccgctgacgcagctgctcgtgagtcaggccgtcgaagtcatccgccagtgcggcagccagctgttgctgaccaatcgcgccctgttcaaataccagtttcttcactgccgccaggctgttgccgaggttagcaatgccgacctgcaggccagaaacccagtcatatttcgcgccgccttgcttgatacttttcgctcgctcaatacagtcatcgaccagcgccgagcagagaatatcgtgtacgttctcttccagcatggtatcgacgacatattcgatttcgattgatttacgcgtgtagtaacggatttgcgtatcccatgcgtccattacttcatcgaagttgttgaagttacccgctgacaacgctttttcttgtggcaggaacactttgccgctggtggcatcacgaccgccttccagcgccgccagcatcacgcgggcgaagttgataaagctcatgccggtacagcgatagccccatttgccaccgacggcggtttcgatacaaccaatcgctgcatagtcgtaagcgtcctgcggttcaataccgagtttaataaattccgggatgacgatttcgtcgttgttgaacgccggcatcccgaagccgcagcggatcacctgaacacaggcgtcgaggaaatcgttactcatacccgcatggtaacgcacgctgaggttaggctgagtcgaacgcaggcgaccgcaagattcgaggatcgcataagagagtggatttaccgcgtccatcggttgaccatcaaccagattttgcccgccaatggtgacgttctgatacagcggacttcccgcagaggcttttgagtgtgagccggagcggattttgttcacttccagcaatttcaaccagcagctatgcagcatctcgatggcgtgttcgcgatccagtgtctggttcagttcaacgtcacggcgatagtatggatagagatactggtccatacgaccaaacgataccgagtgaccgttagattcgatctgcaaaatcaactggatgaagtaacatagttgcagcgcctgccagaaagtctgcggcggctggtgggcgataagatcgcagttttctgctatcgtcagcagttcatcgcgacggctttcgcgggtttcggtcgcggccatttcacgcgccagggcagcgaaacgttcaatgtgttcactgactgccaccagcacgatatcaatcgctttcaggaattgctcgccgtgcagatcttccagaaccgtcagattgatgcgcgagcgacgttccgccactttctcacgcagaccatcaagacctttttccagcagtagcgggaaattgaccgccaggtgcgcatcgccggaggtcatattgccctccgctttaatgattccggtcgccagcagacctttttgctcatcggtaaacatgccgtagcagcgatcctgtacggtctgaccgcgccaccacgggcacacttcatgcagaacgcgtttgttctcttcgctcaccgcaaaaccagcaccgggacgatctgccagatcatcaatctctttttcgatccacgagacggtatattccgggaagatcggcgcggcgcgaacttcgcttgcctggttgccaatgatcaactcatcgtgcttgatccagatggtgcgattcgccaggtgatgcgccagtgccagcgcgcgacgtaccgggattggcttatcgagatgttgttgatacatctcggtatagtgttgtgctcgttcggtacagaccggcggtttcacaatatgcaccagcgcatttttgtgcgctttaatgcggtcgctgagcgtatccagttttagtgttgtcatgattgttatcctcgtaaggtcgcggttaaccctttctggcaggcatactgctgggcaaagtcgagcagttctggcgcatcaagcggtttttccggggcgtcatagggcagattaagtaagtgatatttgttgatgcccagtgtgtggtagggcagaaaatgaatttcgctaacgtgcagctcgtcggcggcaaaatcggtaatggctttcacagaagtttcgtcggcattaaagccctgaatcagtggcacgcggataatgatttttttgccggctgcggcgagttttttcaggttatccagcaccctggcggcgttaccgtcggtccactgtttaaacggcgcgtcggcaacgtgttttaaatcggcaagaaacagatcgatatagggcagagaaggggcgatatatttccacggcacatgcagacaggtttctaccgcagtatgaatgccggcctcgtggctggcttgcagcagcgccgtcgccatttccggctgcataaacggttcaccgccagaaagcgttaagccgccgccgctgcgatcgtaaaacggtttatcgcgcaaaacggttgccatgatctcctcaacgcttttcacttcaccacacacggttaacgcctgtgtcgggcagcagtcggttagcgccgtaaaatgctccggggttaacttttcccgatgaataagcaaaccattcaacgcgcgctcaatcacttccggtgcggtcttagcgcacagcttacagccttccagacagagtcgtgggtcatacagcagatcctgcgtgcgggcgcggctttccgggttctgacaccagcggcagcccagcgaacagcctttaagaaatacgaccgtgcggataccggggccatcatgggtcgagtagcgttgaatattgaaaatcatagttgcctctctgtttcgttcaaacattaaaatactttcgaatgaaagttagattgatgtgcgtcaactgttcagagagttttcccgtgatagtctacattcagacaaaaagtacattttgaggatggttatggaactgtatctggatacttcagacgttgttgcggtgacggcgctgtcacgtatttttccgctggcgggtgtgaccactaacccaagcattatcgcagcgggtaaaaaaccgctggaggttgtgcttccgcaacttcacgaggcgatgggcggtcaggggcgtctgtttgcccaggtaatggctaccactgctgaagggatggttaatgacgcacgtaaattgcgttctattattgcggatatcgtggtgaaagttccggtgaccgctgaggggctggcagctattaagatgttaaaagcggaagggattccgacgctgggaaccgcggtatatggcgcagcacaagggctactgtcggcgctggcaggtgcggaatatgttgcgccttacgttaatcgtattgatgctcagggcggtagcggtattcagactgtgaccgacttacaccagttattgaaaatgcatgcgccgcaggcgaaagtgttagccgcgagtttcaaaaccccgcgtcaggcgctggactgcttactggcaggatgtgaatcaattactctgccgctggatgtggcacaacagatgattagctatccggcggttgatgccgctgtggcgaagtttgaacaggactggctgggagcgtttggcagaacgtcgatttaaccggacgttctgcatcctcataaattgctgatgacgtggcggagtgccgcgtctcatccggcctggaggtggcagttactgcccgcacacctcacaccccggattacgcatcagtttcatttcgcgaaactgacaggtcatcgcatcgtacatcacgatttttccgctggccggtttgccataacctgccagcagtttgatcgcttccattgcctgcaacgaaccaatcaccccgatcaacggtgccatcacgcctgcttctacgcaggttaacgcgttctcgccaaacaaacggctaaggcagtgatagcacggttcgccgtcctgataagtgaagaccgtgatttgcccttccatacgaattgccgcgccggaaaccagcggcaccttcgcggcaaaacagcctgcgttcagttgattacgtactgcaacgttatccgtacagtcgagcaccagatcgtgttttgcaatcatcgcagcaagttcagcgtcatcaagcagcgcattgactggcgtaatcgcgatatgtgggttgatccgcgtcagggcgtcacgggcggattccacctttggttgcccgaccgtggcatcactgtgcagcgtctggcgttgcagattggagagcgaaaccgtgtcgaagtcgagcagcgtcaggttgccgacaccggcgcttgccagatactgcgaagctgcgcagccgaggccaccaagccccaccaccaacacgcgagaatccttcagcgcctcctgaccgtcaaaatcaaaaccgcgcagaatgatttgccggttgtagcgcagcatctcctgatcgctgagttccgccattacaggcctccgaacaacgcgttaaacggttctacttccacccattcgcccacttccacattgccgcgatcgcgttccagcacgataaagcagttgccgaggctaaaggagctaaatatatgtgaaccctgatgtccggtggtcgtcacttccagttcgccatcggcgttgcgttgcagcacgccgcgctggaaatcaaggcgtcctggcgtttttttcaggcgggacgctgtgcgtacacgctggcgcgcgggcaggccactggcggtattgccgcttagttttgccagcaaaggctgtaccagttgatagaaggtcagcgtcgctgaaaccgggttgcccggcaggccgcagaaccaactattagaaagtttaccgaatgcgaacggtttacccggtttaatcgccagtttccagaaggcaatctcccccagctcttcaagaatcgttttggtgtaatccgcttcacccactgaaacaccgccggaactgatcaccacatccgcttggctgtcggcttcaataaatgcggcgcgcagggcatggggatcgtcgcggataatccctaagttgattacctcgcatcccaactgttctaacatcaggtgtacggcgagacggttggtatcgtagatttggccgtcgcccagcggctgaccgggcaactggagttcatcaccggtagaaaaaagcgctacacgcactttacgaatcaccggaacttcggcaatccctagcgaagcaatcactggcagttcagcggtagtcaggcgagtccccgccgggaaaacaaccgcacctgcagagatatcttcaccgcgacggcgaatattttgcccgctacgcgcttcagcagtaaaacgcacgccattgtccgtttgttcagtctgctcctgcatcaccaccgcttcgcagccttccggcaccggcgcaccggtcataatacgaatgcaggtacccgcaggccattcaccatggtacggctgaccggcaaaggatttaccggcaacgggcagcggttgcccggaggcaatatcggctaaacgcaccgcgtagccgtccatagcggagttatcaaaccccgggacatccagtggcgaaacgacatcgctcgccagaatacggccaaaacactgaaccagtggcagcgtttcctgggcggtcagtggggtaacgcgagaaagcatctcattaagcgcggtgtcgagcgacatcaatccggtggtaaattccatgaaaacactcctgcggaggcaaaatcgaatttgcctattatgtcagaaaaacgccacagactgtatgccacctcgggcgtagcgctggctcctgcctttacatgccatatccatctttctatattcaaaaattgaatgagtcattcataaaaattctgatatttatagcaaaagtggcgagccacccttaatggacgaatactatgggcaaagcagtcattgcaattcatggtggcgcaggtgcaattagccgcgcgcagatgagtctgcaacaggaattacgctacatcgaggcgttgtctgccattgttgaaaccgggcagaaaatgctggtagcgggcgaaagtgcgctggatgtggtgacggaagcggtgcgtctgctggaagagtgtccactgtttaacgccggaattggcgctgtctttacgcgtgatgaaacccatgaactggacgcctgtgtgatggatggtaacaccctgaaagccggtgcggtggcgggcgttagtcatctgcgtaatccggttcttgccgcccgactggtgatggagcaaagcccgcatgtgatgatgattggcgaaggggcagaaaattttgcgtttgctcatggcatggagtgcgtctcgccggagattttctccacacctttgcgttatgaacaactaatggcagcgcgcgaggaaggggcaacagtcctcgaccatagcggtgcgccactggatgaaaaacaaaaaatgggcaccgtaggggccgtggcgttggatttagacggcaatctggcggcagccacgtccacgggcggaatgaccaataaattacccggacgagttggcgatagtcccttagtgggggccggatgctatgccaataacgccagtgtggcggtttcctgtaccggtacgggcgaagtcttcatccgcgcgctggcggcatatgatatcgccgcgttaatggattacggcggattaagtctcgcggaagcctgcgagcgggtagtaatggaaaaactccctgcgcttggcggtagcggtggcttaatcgctatcgaccatgaagggaatgtcgcgctaccgtttaacaccgaaggaatgtatcgcgcctggggctacgcaggcgatacgccaaccaccggtatctaccgtgaaaaaggggacaccgttgccacacagtgatgaacttgatgccggtgatgtgctggcggttgaaaatctgaatattgcctttatgcaggagcagcagaaaatagctgcggtccgcaatctctcttttagcctgcaacgcggtgagacgctggcaattgttggcgaatccggctccggtaagtcagtgactgcgctggcattgatgcgcctgttggaacaggcgggcggtttagtgcagtgcgataaaatgctgttgcagcggcgcagtcgcgaagtaattgaacttagtgagcagagtgctgcacaaatgcgccatgtgcgcggggcggatatggcgatgatatttcaggagccgatgacatcgctgaacccggtatttgctgtgggtgaacagattgccgaatctattcgtctgcatcagaacgccagtcgtgaagaagcgatggtcgaggcgaagcggatgctggatcaggtacgcattccggaggcacaaaccattctttcacgttatccgcatcaactctctggcgggatgcgccagcgagtgatgattgcgatggcgctgtcatgccgcccggcggtgctgattgccgatgagccaaccaccgcgctggatgtcactattcaggcgcagatcctgcaattaatcaaagtattgcaaaaagagatgtcgatgggcgttatctttatcactcacgatatgggcgtggtggcagagattgccgatcgggtactggtgatgtatcagggcgaggcggtggaaacgggtagcgtcgaacagatttttcatgcaccgcaacatccttatacccgtgcgctgttagctgctgttccgcaacttggtgcgatgaaagggttagattatccccgacgtttcccattgatatcgcttgaacatccagcgaaacaggagccacccatcgagcagaaaacggtggtggatggcgaacctgttttacgggtgcgtaatctggtcacccgtttccctttgcgcagcggtttgttgaatcgcgtaacgcgggaagtgcatgccgttgagaaagtcagttttgatctctggcctggcgaaacgctatcgctggtgggcgagtctggcagcggtaaatccaccaccgggcgggcgttgctgcgcctggtcgaatcgcagggcggcgaaattatctttaacggtcagcgaatcgataccttgtcaccctgtaaacttcaggcattgcgccgcgatattcagtttatttttcaggacccttacgcttcgctggacccacgtcagaccatcggtgattcgattatcgaaccgctgcgcgtacacggtttattgccaggtaaagaagcggctgcacgcgttgcgtggttgttggagcgcgtgggcctgttaccggaacatgcctggcgttacccacatgagttttccggcggtcagcgccagcgcatctgcattgctcgcgcgttggcattgaatccaaaagtgatcattgccgacgaagccgtctcggcgctggatgtttctattcgcgggcagattatcaacttgttgctcgatctccagcgtgatttcggcattgcgtatctgtttatctcccacgatatggccgtggttgagcggattagtcatcgtgtggcggtgatgtatctcgggcaaattgttgaaattggtccacggcgcgcggtctttgaaaatccgcagcatccttatacgcgtaaattactggcggcagttccggtcgctgaaccgtcccgacaacgaccgcagcgtgtactgctgtcggacgatcttcccagcaatattcatctgcgtggcgaagaggttgcagccgtctcgttgcaatgcgtcgggccggggcattacgtcgcacaaccacaatcagaatacgcattcatgcgtagataacattcaggcggagaataaaatggcaagagctgtacaccggagtgggttagtggcgctgggcattgcgacagcgttgatggcatcttgtgcattcgctgccaaagaggtggtggtggcggtgggatcgaacttcaccacgctcgatccgtatgacgcaaatgacacgttatctcaggccgtagcgaaatcgttttaccaggggctgttcggtctggataaagagatgaaactgaaaaacgtgctggcggagagttataccgtttccgatgacggccttacttacaccgtgaaactgcgggaaggaattaaattccaggatggaaccgacttcaacgcagcggcggtaaaagcgaatctggaccgggccagcgatccggcgaatcatcttaaacgctataacctgtataagaatattgccaaaacggaagcgatcgatccgacaacggtaaagattaccctcaaacagccattctcagcgtttattaatattcttgcccatccggcgaccgcgatgatttcaccggcagcgctggaaaaatatggcaaggagattggttttcatccggtgggaaccgggccgtatgaactggatacctggaatcagaccgattttgtgaaggtgaaaaaattcgcgggttactggcagccaggattgcccaaactggacagcataacctggcgtccggtggcggataacaacacccgcgcggcaatgctgcaaaccggtgaagcgcagtttgctttccccattccctacgagcaggccgcactgctggagaaaaacaaaaatatcgagttgatggccagtccgtcaattatgcagcgttatatcagtatgaacgtgacgcaaaagccgttcgataacccgaaggtccgtgaggcgctgaattacgccattaaccgcccggcgctggtgaaagtggccttcgcgggctatgcaacgccagctactggtgtggtaccgccgagtatcgcctacgcgcaaagttataaaccgtggccttacgatccagtgaaagcgcgcgaattactgaaagaggcgggatatcccaacggtttcagtaccacgctgtggtcgtcacataaccacagcaccgcgcagaaagtgctgcaatttacccagcagcagttagcgcaggttgggattaaagcccaggtgactgcgatggatgccggacagcgggcggcagaagttgaaggtaaagggcaaaaagagagcggcgtgcggatgttctacactggctggtcggcttcaaccggcgaagccgactgggctctatcgccgctgtttgcctcgcagaactggccaccaacgctgtttaataccgcgttttacagcaataaacaggtggatgacttcctggctcaggcactgaaaactaatgatccggcggaaaagacccgcttgtataaggcggcgcaggatatcatctggcaagagtcgccgtggatcccgctggtggtagaaaaactggtgtcggcacacagtaaaaacctgaccggtttttggatcatgccagacaccggcttcagctttgaagacgcggatttgcaataagcaacgcagggagtggaatgcttaattacgttatcaaacgcttactggggttgattccgacgctgtttatcgtctcggtgctggtgtttttatttgtccacatgctgcccggcgatccggcgcgattaattgccgggcccgaagctgatgcgcaggttatagaactggtgcgtcagcagctggggttggatcagccgctatatcaccagttctggcactatatcagcaatgctgtgcagggggattttggcctgtcgatggtgtcgcgtcgtccggttgccgatgagattgccagccgctttatgccaacgctgtggctgaccataaccagtatggtctgggcggtgatatttggtatggcggcgggaattatcgccgccgtctggcgtaaccgttggccggatcgattgagtatgactattgcggtgtcggggatttcgtttccggcatttgctctggggatgcttttaattcaggtattctctgttgaactgggctggctgcctaccgtgggagcagacagttggcagcactacattttaccctccctgacgctcggcgcggcagtggccgccgtgatggcgcgctttacccgcgcgtcgtttgtcgacgttttaagcgaagattatatgcgtaccgcgagggcgaaaggggtgagcgaaacctgggttgtcctcaaacacgggctacgcaacgcgatgatcccggtagtgaccatgatgggcttacagtttggcttcttgctcggtggttccatcgtggtggagaaagttttcaactggcccggacttggacgcttactcgttgactccgtagaaatgcgcgattacccagtgattcaggcggaaattctgcttttctcgctggaatttattcttatcaacttagtggtggatgtgctttacgccgccattaacccggctatcaggtacaagtaaggatgcgactatttaactggcgacgtcaggcggcgttaaacgccatgccactggtcaaacctgaccaggtacgtacaccgtggcatgaattctggcgacgatttcgccgtcagcatatggcgatgaccgccgcattgttcgttattttattgattgtggtggccatttttgcacgctggatcgctccctatgacgccgaaaattattttgattatgacaatctgaataacggaccttctttgcagcactggtttggtgtcgattcactggggcgcgacattttcagccgtgtcctggttggtgcgcaaatatcgctggcggcgggcgtgtttgccgtgtttatcggtgcggcgatcgggacgttgctgggcttgctggctggatattatgaaggctggtgggatcggctgatcatgcgcatttgcgatgtgttgtttgccttcccgggtattttactggcgatcgctgttgttgcggtgttgggaagcggcattgctaacgtgattatcgcagtcgccattttttccatccccgcgtttgcccggctggtgcgcggcaacacgctggtgttgaaacagcaaacctttatcgagtcagcacgcagtattggtgccagcgatatgaccattttgttgcgtcatatcttgcctgggaccgtctcttctatcgtggtgtttttcaccatgcgcattggcacctcgattatctctgccgccagcctgtcatttctcggcctcggtgcgcagccgccgacaccagagtggggggcaatgctcaatgaggcacgagcggatatggttatcgcgccgcatgtcgctgtttttccggccctggctatttttctgaccgtactggcgttcaatttgttgggcgatggtttacgcgatgcgctggatccgaaaattaaaggatagttacgtttgaatattgcttgaaagggtaatcacctcacaggaaattattgccctaagcaagtgttgtaactttctgctgattttgtagaatcgggtaatttggttaaaaagccgcagcaagggactattttgcagcggcacagcgttcagatagttattttgttaaatgtattaacatgctgagtttatacgaaaagataaagataaggctgataattttatttttattggcagcactgtcatttattggtctttttttcatcattaactatcaactggtatcggaacgcgcggtaaaacgtgccgatagccgctttgaacttattcagaaaaacgttggctatttctttaaagatattgaacgttcggccctgacattaaaggactcactgtatttattaaaaaatacagaggagattcaacgcgccgtaattctgaaaatggaaatgatgccatttttagactcggtgggactggtacttgatgataataaatattatctcttttcgcggagggcgaataataaaatcgttgtttatcatcaggaacaagtaaatggaccgcttgtcgacgagtcagggcgggttatttttgccgattttaacccatcgaaacgaccgtggtcgatggcttcagatgactctaacaacagctggaaccccgcatacaattgctttgatcgtccgggtaaaaaatgtatctcttttacgctacacatcaacggcaaagatcatgatttgttagcggtagataaaattcatgtcgatttaaactggcgatatctgaacgagtatcttgatcacatcagcgctaatgatgaagttctatttttaaagcaaggtcatgagatcattgctaagaatcaactcgctcgtgaaaaattgattatttataatagcgaaggtaattataatattattgattctgtcgatacggaatatattgaaaaaacatcagcggtgccaaacaacgcattattcgaaatctatttttattatcctggtggtaatttattgaacgcatcagataaacttttttatctgccgtttgctttcattattatcgtattgctggtggtttatttaatgaccactcgagtgttccgtcggcaattttctgaaatgacagatttggtcaatacgctggcgtttttgcccgactctacggatcaaatcgaggctctgaagattcgtgaaggcgatgcgaaagagattatcagcatcaaaaattcgatcgcggaaatgaaagatgctgaaattgaacgggcaaataaattgctctcgctgatctcttacgatcaggaaagcggttttattaaaaatatggcgattattgagtccaacaataatcagtatctggctgtggggatcatcaaactgtgtggtctggaagctgtggaagcggtgtttggtgttgatgaacgcaataaaatcgtcaggaaattgtgtcagcgaattgccgagaaatatgcgcaatgctgcgatatcgtgacatttaatgccgatctctatttactcctgtgccgggaaaatgtacagacgtttacccgtaagatagcgacggtaaacgattttgacagcagttttggctaccgcaatctgcgcatccataagtctgctatttgtgaacctttgcagggggaaaacgccaggagttacgcagaaaagctgaaactggcgatttccagtatccgcaaccatatgttctcagagtttattttctgtgatgatgcgaaactcaacgaaatagaagagaatatctggattgcgcgtaatattcgccatgcaatggaaattggcgaactattcctggtctatcaaccgattgttgatattaacacccgcaccattttgggcgcggaggcgttgtgccgttgggtgtctgcggagcgggggattatttcaccgctgaagttcattaccattgctgaagatatcgggtttatcaatgagctgggctatcaaattattaaaaccgcgatgggtgaattcagacattttagtcagcgtgcgtcgctgaaggatgatttcttactgcatattaatgtttcgccctggcagttaaacgaaccacactttcatgagcgttttactaccatcatgaaagaaaatggcctgaaggcgaacagcctttgtgttgagatcaccgaaaccgtgatcgagcgaattaatgaacatttctatctcaatattgaacaactgcgtaaacaaggggtacgggtatcgattgatgactttggcaccggtttgtcaaacctgaaacgtttttatgaaattaatccagacagtataaaggtggattcgcaatttaccggcgatattttcggtactgcaggaaaaattgtgcgcattattttcgatctggcacgctataaccggatcccggtgattgcggaaggcgtagagagcgaagacgttgcgcgtgaattaatcaaattaggatgtgttcaggctcaggggtatctgtaccagaaacccatgccattctccgcctgggataaaagtggaaaattagtaaaagagtagtttacgtatgtccagaatcaataaattcgtacttacagtcagtctgctgatttttatcatgatttcagcagttgcctgcgggatctacactcaaatggtaaaggaacgggtgtatggcctgaaacagtccgttattgatactgcttttgcggtggcaaatattgctgaatatcggcgtagtgtggcaattgatctcatcaacacgctaaatcctacggaggaacagctgttggttggcttacgcacagcttacgccgactcggtttcaccctcttatttgtacgatgtcggtccttatctgatttccagtgatgaatgtattcaggtaaaggagttcgagaaaaattattgtgcagatattatgcaggttgttaagtatcgacatgtcaaaaatacagggtttatctcttttgatggtaaaactttcgtctattacctctatccggtaactcacaatcgtagtctgatatttttgcttggtctggaacgtttttctttactgtcaaaatcgctggcgatggatagcgagaacctgatgttctccctgttcaagaacggtaaatcggtgaccggtgatgaatataacgctaaaaacgccatcttcaccgtttcggaagcaatggagcacttctcctatttgccgaccgggttgtacgtatttgcttataaaaaagacgtttattttcaggtatgtacattgattattttctttgccgcattggtggcagtgatatcgggtgccagttgcctctatctggtacgcagagtgattaatcgtggtattgtggagaaagaagccattattaataaccattttgaacgcgtactggatggcgggcttttcttttcggctgccgatgtcaaaaaactctacagtatgtataactcggcattcctggacgatctgaccaaagcgatgggcagaaaatcctttgacgaagatttaaaagcgctgccggaaaaaggcggttatttgtgcctgtttgacgtcgataaattcaaaaacattaacgacaccttcggtcatttgctgggcgatgaagtgttgatgaaagtggtgaaaatccttaaatcacagatcccggtagataaaggtaaagtctaccgcttcggaggtgacgaatttgcggtgatttatactggcggcacgctggaagagttgctatcgattctaaaagaaatcgttcatttccaggtgggaagcattaatttaagcaccagtatcggtgtagcgcattcaaatgaatgtactaccgttgaacgtttgaaaatgctggcggatgagcggctgtataagagtaagaaaaacggcagggcgcagattagctggcagtaatcattattcgcaggccggacaaatgattttgcccggcctgaattaattaaacccggctaccccacaaatcgtactcatcggcgtgctcgactttcactcgcaggatatcacccggcttaacgttggtttcaccattgagataaaccgcgccgtcgatttccggtgcatctgccatgctgcgaccaatcgcgccttcttcgtccacttcgtcgataatcaccagaatttcacggcccactttctcttgcaggcgctcggcggaaatttgctgctgcaactgcatgaaacggttccagcgttcttctttcacttcttccggaacctggtcaggcagggcattggcgtctgcaccttcaaccgggctgtatttaaagcagccaacgcgatccagacgtgcttctttcaggaagtcgagtagcatctggaaatcttcttccgtctcgccagggaagccaacaataaaggttgagcgtagggtcagttccgggcagattttgcgccactgtttgatgcgcgccagttggcgatctacagaacccggacgtttcatcagtttgagaatgcgcgggctggcgtgctgcaacggaatgtccagatacggcaggattttgccctctgccatcagtgggatgacgtcgtccacatgcggataagggtaaacgtagtgcagacgtgtccagatccccagtttcgataactgttcgcacaggctgaccatgctggtttttaccggctcgccgttgtggaagccagtacgatgtttaacatcgacgccatacgcggaagtatcctgcgagatcaccagaatttctttaacgcccgcatcaaccagacgtttcgcttcacttaacacttcgccaatcggacggctcaccagatcgccgcgcatagacggaataatgcagaaggtgcagcggtgattacagccttcagaaattttcagataggcataatgacgcggcgtcagtttcacaccttgttctggcaccaggctcaggaatgggttgtgtttcggttttggcacgtagtgatgaacgtgctccagaacctgctcatagctatgaggcccggtgatttccagcactttcgggtggacttcgcggatctgatcttcttttgcccccagacaaccggtcacaattaccttgccgttttcattcaacgcttcaccaatggcttccagtgattcttgtaccgcgctgtcaataaagccgcaggtgttgacgatcaccatgtccgcatcatcatagctcggtaccacgtcataaccttcagtgcgtagttcggtgagaatacgctctgaatcgacaaggtttttcggacagccaagggaaacaaagccgattttcggctggggagttactttgctcatagcttaaaaaatattcagttacaggaaaggtcagggcagggattctacagagttctggataaaatttgtatcgcaatctcattcgctggcggagttgaaggaaatgtaaattttgttaattcggcgtgaagaattgctcctggacagcattttgctcaaaaaacagccatactatttagttgcaacaaggctggaaagaggaggatcgaagtatgttcgttgacagacagcgaatcgatatgctgaaccggttgatcgacgcacgcgttgacctcgccgcatacgtgcaactgaggaaggcaaaaggatacatgtccgtcagcgaaagcaatcatctacgagataacttttttaaactgaatcgcgaactgcacgataaatcgctgcggttgaatcttcatctggatcaggaagaatggagtgctcttcatcatgctgaagaagcattagcgacagccgcagtatgtttgatgagtgggcaccatgattgcccgactgttattaccgtcaacgccgataagcttgaaaattgtctgatgagcttaacgctgagtatccagagcctgcagaagcacgccatgcttgagaaggcctgaaaactaagggggagaaagcgtctcccccttcatgtttaagtttttgtaaaaatgaatttgttatctcctccactgactacgctttaagccagagtcaatccggaggcgttatgcatcgacaatcctttttccttgtgccccttatttgtctttcttccgctctctgggcagctcctgcaacggtaaatgtcgaagtactgcaagacaaactcgaccatccctgggcgctggcctttttacccgataatcacggtatgttaatcactctgcgcggcggcgagttgcgtcactggcaagcaggaaaaggattatctgcgccgctttccggagtgccggacgtttgggcgcacgggcagggcggcctgctggacgtggttttagcgcccgattttgctcagtcgcgccgcatctggttaagttattccgaagttggcgatgatggcaaagccggaactgctgtgggttatggccgcttaagtgatgatctctcaaaagtgaccgacttccgcaccgtctttcgtcagatgccaaaactgtctaccggtaaccattttggcgggcggatggtattcgacggtaaaggttatctttttattgctctgggcgaaaacaatcagcgcccgacggcgcaggatctggataaattacagggcaaactggtgcgtctgaccgacctgggagaaatcccggatgataatccttttataaaggaatccggtgtgcgcgccgagatctggtcttatggcattcgtaatccgcaaggaatggcgatgaatccgtggagtaatgcactatggctgaatgaacatggcccgcgcggtggtgatgaaattaatattccgcaaaaaggcaaaaactacggctggccgctggcaacctggggaatcaactattcgggctttaagataccggaagcgaaaggggagatcgtcgccgggaccgagcaacctgttttttactggaaagattcgcccgccgtgagcggcatggccttctataacagcgacaaattcccccagtggcagcaaaaattatttattggcgcgctgaaagataaagatgtcattgtgatgagcgtcaacggcgacaaagtgacagaagatggccgtattttaacggacagagggcagcgaattcgtgatgttcgcactggacccgacggttatttatacgttctcaccgacgagtccagtggggaattacttaaagttagcccacgcaattagctaacgggaatcatcaccactttgcgcactgcggggcgttcagtgagttgctgataccagcgttgcagatttggacgcggtgtccaggtcaggccaacgttaaacaaattgtagatgaacggtgcgatagcgatatcgcccacaccaaactcgtcgcctgagaaccattttacttttgccagttccgcatcgagcagggcaaacagggcgtcgcactctttgcaactggcatcaatggcggcctgatcgcgctcttccggtggtgttctgactaatcccatcaggatcccgcgatgagcattactgagcgtctggtttgcccagtccatccatttttctgcttccgcacgacgtgccggtgagtcgatccacaggcgtttttgcccgtactgtgccgccagatagcggacaatggcgtttgattcccaaagaatgagatcactttcgtcgtcacgcaacaacggcaccagcccgttagggttcatcgccagaaaatcagcatcgtgatttatcccaaactcacggcccgcgagaatttgctcataaggtagttccagttcttcgagcgtcagcaatactttttttacgttggttgaattattccgaccccacagcgtaatcatactcaccccttttccgacaggcagccacaggctgaacaggactccgatggtgaagtaaagttaacttttaagcaacagctggcaaaaaaatgacaccagaagcagcgaagcggcaggatattgcataaactttaaaaactttaccaacttacggtttctttaagtttgtgtgtgcgttattaatcaccgaacttatcatacggcgatataacgtattttttttgaatggatactcgggtggcatttatgacgcaatactcctctctccttcgtggtcttgcagcgggttctgcatttttattcctttttgccccaacggcattcgcggcggaacaaaccgttgaagcgccgagcgtggatgcgcgtgcatggattttaatggattacgccagcggtaaagtgctggcagaaggcaatgcggatgagaaactggatcccgcgagcctgactaaaattatgaccagctatgtggttgggcaggcgcttaaggccgataagattaaactcaccgatatggtgacggtcggtaaagatgcctgggcgacgggaaatccggcactgcgtggttcatcggtaatgttcctcaaaccgggcgatcaggtttcggtggcagacttgaacaaaggtgtgattatccagtccggtaatgacgcctgtattgcgctggctgattacgttgccgggagccaggagtcatttattggtttgatgaatggttatgccaaaaaactgggtctgaccaacactaccttccagacggtgcacggcctggatgcgccggggcagttcagtaccgcgcgcgatatggcattgctgggtaaagcattgatccacgatgtgccggaagagtacgccattcataaagagaaagagttcaccttcaacaaaattcgtcagcctaaccgtaatcgtctgctgtggagcagcaatctgaatgttgatggcatgaagacaggaaccacggcaggcgcgggatataatctggttgcttcggctacccagggcgatatgcgtttaatctccgtagtgctgggggcgaaaactgaccgtatccgttttaatgagtctgagaaattattgacctggggcttccgtttctttgaaaccgtgacgccaattaaacctgatgccacatttgtgactcagcgcgtctggtttggtgataagagcgaagtgaatctcggggcaggcgaagcgggctcagtgaccataccgcgtgggcagctgaaaaacctgaaggcgagttatacgttaacggaaccgcagcttaccgcaccgctgaaaaaaggtcaggttgtcggcaccattgatttccagcttaacggtaaatccattgagcagcgtccgctgatcgtgatggaaaatgtggaagagggcggattctttggtcggatgtgggatttcgtgatgatgaaattccatcagtggttcggcagctggttctcttaatcttctgataaccggatggcgcgaaacgtcatccggttatacgtcattaatacatcaacttaatacgctgcgtctgcgcgtacttcacatattcatcttccgggcaacaatcgctcacaacaatatcaaagcgtttcaggtcacccatgcgcgccggacgcaccttgccaaatttactgtggtcgacaaccagcacatgcttttgcgccatcgacatggcccagtgttttaccggcaactcttcaagattaaagcaggtagcgcctttactgacatgcacgcccgcagcggaataaaaagcgatatccgggcaaaaattattcagcgtttgctgaaaatcgatgggtttgaaaatggcgttgctggcgtgaaattcaccaccgcaaagaaacgcgcggcaatggggtttctctttcagcgccagaaaggtatttagcgaataacaaacggcggtaaaagggatttcattatcaattgcttcaataatccacggcgtggtggtgccacagtcaaaaaagagggtctgatcgggttctaccagcgtcgcagccagttttgccgcccggcgtttttcttccaccaggcgggatttttgatcgcttaacaggtaatggctggcgctgcgtggttccagaacaatatagccgccgagcaaaacgacgggcgcactgtggttgttcagatcgcgacgaatcgtcatctccgaaaccccaagcagggcggcggcgtctttaagatgtaacttatcactgcgttttaattcttgcagcagctgcccgatacgctcttcgcgacgtgtttccataatccctctgaatagttattgaagcgagccgctcaatactacactttttagcagagatcagtcacgcacccagcctttgcggatcggtaatgcaaaacagaagcgataccacgattgcagacgttgatagagtttatgccccatcgcttgccagataatctgggcgctaaggcagccaatcatacctgccagcaatccaccgagcatatccagcggccagtggacgccaagataaacgcgcgaccaggcaatgacgacggccagcaccattaaaagtgagccggaccacaggcgatgccagcataaaaatgccagtgcaaaggtgaaaatcaccgtaccgtgatcgctcgggaatgagtcatccgccgcatgatgcaggaagttatagccgatattttcgacaaagggtcggtcgtgcggaaaaagatgtcccatcgtccaggacacaaacaggctgaccgccagcgcgatagcgatttttatcaccagttgccgttgtgctgtaagcccccacaaccaaagtactgcggccagcaacggcaccacggtaatcaaatctttagcaataaaaatcgccaacgagatcatccacggcgcagagtctggcgttgcgttaataagagagaatagagagagattcaaattttccagcataacttcccgacgcaaagtgattaaaagggagccaatacaggcaagtcgttgagaataaagtgcaggttaaactgggtaaagcggcatcgtcttatttccctcaagcggcctgtttacggtaggtgattgtaacgggcaaaggttaaataaaacttaaagaaagcgtagctatactcgcaataatgtaagaatgtgcttaaccgtggtttcagctacaaaattcgctttctcgttagctgcgcttttattaaactttgcgcgattattattggcgaagaaattgcatgcaaaataaattagcttccggtgccaggcttggacgtcaggcgttacttttccctctctgtctggtgctttacgaattttcaacctatatcggcaacgatatgattcaacccggtatgttggccgtggtggaacaatatcaggcgggcattgattgggttcctacttcgatgactgcgtatctggcgggcgggatgtttttacaatggctcctggggccgttgtcggatcgtattggccgccgtccggtgatgttggcgggagtggtgtggtttatcgtcacctgtctggcaatattactggcgcaaaacattgaacaattcaccctgttgcgcttcttgcagggcataagcctctgtttcattggcgctgtgggatacgccgcaattcaggaatccttcgaagaggccgtttgtatcaagatcaccgcgctaatggcgaacgtggcgctgattgctccactacttggtccgctggtgggcgcggcgtggatccatgtgctgccctgggaggggatgtttgtcttgtttgccgcattggcagcgatctcctttttcggtctgcaacgagctatgcctgaaaccgccacgcgtataggcgagaaactgtcgctgaaagaactcggtcgtgactataagctggtgctgaagaacggccgctttgtggcgggggcgctggcgctgggatttgttagcctgccgttgctggcgtggatcgcccagtcgccgattatcatcattaccggtgagcagttgagcagctatgaatatggcttgctgcaagtgcctattttcggggcgttaattgcgggtaacttgctgttagcgcgtctgacctcgcgccgcaccgtacgttcgctgattattatgggcggctggccgattatgattggtctgttggtcgctgctgcggcaacggttatctcatcgcacgcgtatttatggatgaccgccgggttaagtatttatgctttcggtattggtctggcgaatgcgggactggtgcgattaaccctgtttgccagcgatatgagtaaaggtacggtttctgcggcgatggggatgctgcaaatgctgatctttaccgtcggtattgaaatcagcaaacatgcctggctgaacgggggcaacggactgtttaatctcttcaaccttgtcaacggcattttgtggctgtcgctgatggttatctttttaaaagataaacagatgggaaattcgcacgaagggtaaaaaaatgcctgattgctttgtgcgatcaggcattctcgaattaatggtgatggtcgtcaatctggtgttcgataaccatcccttcacctacgctggcaagatggcgaacataaggatgcgggcggtaagccggagctggcgcaggagccgcatagacggtttgcggcacagtcgcgacgctgaccgcttgtggaacgctgactgaatcaggaaccacaaccactttgtatccactcggcacatagacggtgacactttgtgccatcgccacaccagtaaagcccattaaaagcgcgcccaacagtagacaatttttcataatcatttcgcctgaaataatgcagcgggttaatttccgcgaattatgcagccttcattcaggtattgtgttgccgggcgtgctgccttttttattgcttaaatggcgcttcgtgtttaagcactttatcgatcacatccagtacgccttcacggttattggagcctgcccggtattttgccgctgcgacgaccgcgctgccggcattttccattgcaaaactaaagcctgcctgacgcagcatctcaatatcgttaccaccatcgccaaagaccaccacttcgctgtcgtctattccccataatttctgcagttggcgaaggccattggctttatgtacaccggggataatcagatcgatgctgccgttgccggtatggaccggtaccatgatatcgccgatggcctcatgtaatgctttttgcacttgtgggatcagttcgtcagagagattaaggccaaatttaaagaagatatcttctaagttgtcaaagttatcgacgtattccagacggtgataatacatttccgccaccgttttcatggcatcgtcatattttttgagggtataggcgctattttttccgcaggcaataatttccacttccgggcgcgtcagcaaatgttccacgacagtagcaaacgcatccttcgacagctcgccattaaaaacatctttgccttcgctcactacccagccgccgttttcagccacaaaggctatttcattagcaatttcagggaagaaagagatcaactgataatattgattcccgctggcgaccacaaagcgaatgccttgtgctttcatttgctgatactgagccataaaccgctcacggttataggttttttgatcgcttaagaaagtaccatccatgtctaccgcaattaatttaatgctcatcaactattctccatcgccgtctgcgttttggtatcgggtttggcgacggctttcgcgacaatagccgcgagaataaccagcgccagtacaaccagcattgcactacgtaatccataatgttcgccgagatagcccagcagcggcggcccgacgaggaaagccagataaccggtcgtagctaccacgctgacgcgggttggtgcatcggggccggtatcgctggcggcagaaatggtcagcgggaagcccaacgaggcacccagtccccaaagtacaacagacaccccagcgacccaggcgctatcgacaaaaataatcagcccaatacccaacgcccccattagtgcactggcccgaaccacggcaacgcgactgtaatggtcaatgaaccaaccgccgataaagcgtccaacggtcatccccagggtaaaaccggcataaatcagcgagccggaagtagggctaaaaccgtgaccatcaaccattaataagggtaaccagtcgttggcagaaccttcggcaaaggccatcgccagcaccacaacaccaatcagcagcaactggatatcgcgataaaaaggtacgcctttttcaccatgctgggtgccatcggcagcatttttgcccgtaccgtcagggattgcctgaatggcgatataaataggcgcgatgcctaccagcgccgccaataaaatgtgcaccgttgccggaacgccaaaggccgtcagtgccatcccgacaccagcgcctgccagcgtgcccaggctataaaaaccgtgcatcatcggtaaaaccgtcttattcatttctctctcaacggcggcaccttcaacgtttatcgccacttccgcagaaccaaaactagccccaaagacgccgagaccaacggcaaagagcaagggcgatgtcagccagagtgccagacttagtatcatcatcccaatcaatgcgcaggacatcgtgacaaggatgacattacgcgtcccaaagcgtttcactaaccacgctgagcagagaataccgctcatcgaaccgatcgacagaccaaagagaacaccgcccatttcagcgatcgagacagagagaatatcgcggatagcaggcgtacgggttgcccaggacgccattaacaggcctggcaaaaagaagaacataaacagcgcccaggttcggcgtttcaatgcattacgtgaagaatttacggtcatagaccacgtcaaaataagaagagggaagacaacattagcaagactgtgtacatttgtacacaattgcagagagaggaaatgacatgcgtcgcgctaacgatccgcaacggcgagaaaaaattatccaggccacgctggaggcggtgaaactttacggaatacatgctgttacacaccgcaaaattgctgcccttgccggggtgccgttgggatcgatgacctactatttttcaggaattgatgagttgttgctggaggcgttcagccgttttactgagatcatgtcccggcaatatcaggcattttttagcgatgttagtgatgctccaggcgcatgccaggctatcaccgatatgatctacagctcacaggtcgcaacgccggataatatggagctgatgtaccagctctacgcgctggctagccgaaaaccgctcttaaaaacggtaatgcaaaactggatgcagcgcagtcaacaaacgctcgaacaatggtttgaacccggaaccgcccgcgcgcttgatgcgtttattgaggggatgacgctgcattttgtcaccgaccgtaagccgctatcacgcgaggagattttgaggatggttgagaggattgctgggtagtagataaatttcaggcaacaaaaaacccatcaaccttgaaccgaaatggcggggttgatgggctccacaaaatggggacatcaaagaaaagcagtggcactaattaagactgatgccctgcggaaaagttctgcggttgtgcaaaaaaatttcattttcagggcaacttcagttttatcctaatcctggccataccatgacgatgattgtccctgccagcgtcagcaggacgttggcgattgcataggtgcccgcatagcccagcgccgggatgttactgcgagctgtatcactgatgatctccattgccggcgcgcaggtgcgtgcgcccatcattgcgccgaacaacagtgcgcggttcattcgcaatacataagcaccgaacaagaaacagataaccactggcacaagactgacaatcaatccggcaatcaacatctgaccgccaatcgcgcccaggccgttattaataccgctaccggcgctcagaccaacgcctgccataaacaccattaagccgaactctttcaccatgcttaatgcaccctgcggaatgtaaccgaaggtcgggtggttagcgcgcataaatcccagcataattccggcgaataacaacccggcagcgttccccatgccgaaactgaatgtgctgaactggaaggtgatcatcccgatcatcagcccaataacaaagaaggcgcagaatgccagcaagtcagtgacctggctgtgaatcgagataaagccgatgcgatcggcgatggtttttacgcgacgggcatcgccgctgacttgtaaaacgtcacctttgttaagcacgacgttgtcatctatcggcatctcaatctggctacgaatgacgcggttaaggaagcaaccgtgatcggtcaacttcagttgtgcgagacgtttgcccacggcgttatggtttttaacgaccacttcttcagtgacgatacgcatgtcgagaaggtcacgatcgaaaacttctttgccgttacggaagctgggatcgagtcgtgcgtgggcgtcgggatagcctaccaacgctatttcatctcccatttgtagcacagcatcaccgtctggattcgccagaatcccgttacgtcgaatacgttcaatgtagcagccagtttgtcgataaatacccagttcacgcagatttttgccgtcggtccaggccaccagctccgggccgacgcggtaggcgcggatcaccggtaaataaaccttacggttggcatcagtgtccaggccacgttcgcgggcgatttgctgggcgctggtctgtaagtcctgatgctgcaatttcggcaagtaacgcgcaccaacaatcaaactcaccagaccgattaaataggttaaggcatacccgaggctcagattatccagtgccagtgagagctgcctgctttccatgccggaatgacgcagtgtatcgccagcaccgaccagaaccggtgtcgacgtcatagagccagctaacataccggccgtcaggccaatatcccagccaaacagcttacctaaccctaaggcgatcaccagcgcactgccaaccatcaccagtgctaacattaggtaatttttcccatcgcgaaaaaaaatggaaaaaaagttcggtccggcttcgaccccgacgcagaaaataaacagcataaagccaagattaagcgcgtcggtgttaatgctgaaatgttgttggcctaataacagcgatacgactaaaacgccaatggaattacccagttggatcgaaccaagtcgtaatttcccgagacatagcccaagcgcgaggaccacaaataataacagaatgtaattcccatttaacaattcggcgacgtttatattcacggaggctaacttcttgtttactagtaagctgttgaaagaaatggtaatttacgataatgttttttaccagaattcagggcgcagattcattcagcgcacctaaacgatagtaaagtaacaatatattttactagtgtaatcacattaggtatcaacggctatatgaattgcgttggcctatattagcatggaatgcgaagcggctttatcttactgaacgccacactggcgaaaaatgtgttcgatagacgcagtgtcaggaggaacgagtgaaacataaacaacgttgggcgggggcaatctgctgttttgtcctcttcattgtggtgtgtctttttctggcgacgcacatgaaaggcgcttttcgggctgccgggcatcctgaaatcggtttgctatttttcattcttcctggtgcagttgccagcttcttttcacatcgtagagaagtcctgaaacctctgtttggcgcaatgctggcggcaccctgttcgatgctcattatgcggctgtttttttcaccgacgcgctcattctggcaagagctggcatggttattaagtgcggtgttctggtgtgcgctgggggcattgtgtttcttatttatcagtagtttgtttaaaccacagcacagaaaaaatcaataaagccctcaacgcgagggcttgtcagacgatcaggcgtccagattctctttcacccatgcagcaaaatcggtatagccgccgatatgttgctgatcgacaaaaatctgcggcacggtttctacgggtttacctgccttttgttgtagatcttctttagtgatcccttccgcacgaatatctacatactgatactggaaatcatcgcgctcattgctcaatttctcggccagatctttggcacgcacacagtaagggcaacccggacgaccaaaaataacggtttgcattatttctctcctcatagatttatgcctgtaatgatcacgctaaaatgtattcgctgaaagtaggtttaacctgttgcattaattgctaaaagctataactgttaaacacaatgcagtgaaaagttttagactgaaggctcactttgcagagggaagcgtatgcgcgcgatcggtaaattgcctaaaagcgtgttgatactggaatttatcggaatgatgttgctggcggtggcgctgctgtcggtaagcgactccctgtcgctacctgagccattttctcggccagaagtgcagattctgatgatttttctcggtgttttgctcatgattcccgctgcggtggtggttattcttcaggtggcaaaacgtcttgccccacagctgatgaaccatccaccgcaatattcacgttcagaaagagaaaaagataatgacgccaaccattgaacttatttgtggccatcgctccattcgccatttcactgatgaacccatttccgaagcgcagcgtgaggcgattattaacagcgcccgtgcgacgtccagttccagttttttgcagtgcagtagcattattcgcattaccgacaaagcgttacgtgaagaactggtaacgctgaccggcgggcaaaaacacgtagcgcaagcggcggagttttgggtgttctgtgccgactttaaccgccatttacagatctgtccggatgctcagctcggcctggcggaacaactgttgctcggtgtcgttgatacggcaatgatggcgcagaatgcattaaccgcagcggaatcgctgggattgggcggggtatatatcggcggcctgcgcaataatattgaagcggtgacggaactgctgaaattaccgcagcatgttctgccgctgtttgggctgtgccttggctggcctgcggataatccggatcttaagccgcgtttaccggcctccattttggtgcatgaaaacagctatcaaccgctggataaagacgtactggcgcagtatgacgagcaactggcggaatattacctcacccgtggcagcaataatcgccgggatacctggagcgatcatatccgccgaacaatcattaaagaaagccgcccatttattctggattatttgcacaaacagggttgggcgacgcgctaaaactgccacgtcgatgtatgatacgcgggcttttgaccaggtctgacagagaggtgcagggtgaaaattgccatattgtcccgggatggaacgctctattcgtgtaagcggctgcgtgaagccgctatacagcgcggtcacctggttgaaattcttgatccgctttcttgctacatgaacataaatcctgcggcgtcttctattcactacaaaggccgcaagttaccccattttgacgcagtgatcccgcgtattggcaccgccattaccttttatgggacggcggcactgcgccagttcgagatgctggggagctatccgctcaatgagtcggtcgccattgcccgggcgcgtgacaaattgcgttccatgcaactgctggcgcgtcagggcatcgacctgcctgtcacgggcattgcgcattcgccggatgataccagcgatttaatcgacatggtcggtggtgcgccgctggtggtcaagctggttgaaggcacgcagggaattggcgtcgtgctggcggagacgcgtcaggcggcggaaagcgtgattgacgctttccgcggtctgaacgcgcatattctggtgcaggaatatatcaaagaggcgcaagggtgcgatatccgctgtctggttgttggcgatgaagtagtcgctgcgattgaacggcgggcgaaagagggcgattttcgttccaatttgcatcgtggcggcgcggcaagcgtcgccagtatcacaccacaggagcgtgaaatcgcgataaaagccgcgcgaacgatggcgctggacgttgctggtgtggatattctgcgtgctaatcgcgggccgttggtgatggaagtgaatgcgtcgccagggctggaaggaatagaaaaaaccaccggtatcgacatcgcgagtaaaatgatccgctggatcgaacgccacgctacgacagaatattgcctgaaaacgggtggttagtcgcaatcacattactgatcatggttttgcctgcgctttttgcgtaagctgtgccggtctttttatcggaagaggttgtacaaaattatgacatcgctggtcgttcctggtctggatacgttgcgtcaatggctcgatgacctggggatgagtttttttgaatgtgataactgtcaggctctgcatctgccccatatgcagaatttcgacggtgtctttgatgctaaaatcgatctgatcgataacacgatcctgttttctgccatggcggaagtccgaccttcagccgtattgccgctggcggcggatttatcagccatcaatgccagttcgctgaccgtgaaagcatttcttgatatgcaggatgataatctgccaaagctggtggtttgccagtctttatccgttatgcagggcgtaacctatgagcagtttgcatggttcgtgcgtcagagcgaagagcagatttcgatggtcattcttgaagctaatgcccatcaactgctgttaccgactgacgatgaagggcaaaataacgttaccgaaaactatttcctccactgataactcctttcgagcacgcagtcgctgccgcagtgactgcgtgccgcaaaattatccgctgtttttaaccttttattaaagattaattcacttctcttgtgccgatttggctttatcacatagagcaaatacgcataaaatttgttaaataccgttttttaatccgagctatagtctcaaaccctggctaaagttattcttgcgatgcttttatatagtgagcagtgcaggccgggagagagttctcttttcttacaccgcgccgataaaaatatgcacgtttattgcatatctttcagtgtgacaacttttgttcgtttgttaacgaattttcagaaggaaagagatatgaccgccttaaataaaaaatggctatcgggtctggttgcgggggctctgatggctgtctctgtcagcacgctcgcggctgaacaaaaaacactccacatttatagctggtctgattatatcgccccggacaccgtggccaactttgaaaaagaaaccggtattaaagtcgtctacgatgttttcgattctaacgaagtactggaaggcaaattaatggcggggagcaccggctttgatctggtggtgccgtcagcaagctttcttgagcgccagctgacagcgggagttttccagccgctggataaaagcaaattgccggagtggaagaatctcgatccggagctgctgaagttggtcgccaaacacgatcccgacaataaatttgctatgccctatatgtgggcgacgaccgggattggctataacgtcgataaagttaaagcggtgctgggcgaaaacgcgcccgtcgatagctgggacttgatcctcaaacctgaaaatctggaaaaactgaaaagctgcggtgtctctttcctcgatgcgccagaagaagtgtttgctaccgtgctgaattatctcggcaaagatcctaacagcactaaagcggatgattacaccggaccggctaccgatctgctgttaaagctgcgcccgaacattcgttatttccattcatcccaatacatcaatgatctggcgaatggtgacatctgtgtcgctattggctgggcgggcgatgtctggcaggcgtcaaaccgcgcgaaggaagcgaagaatggcgtgaatgtctcgttctcgattccaaaagaaggggcgatggcgttctttgatgtattcgccatgcctgcggatgccaaaaacaaagacgaagcctatcagttcctgaattacctgctgcgtcctgatgtggtggcacatatctctgaccatgtgttctatgctaacgccaataaagcagccacgccgctggtgagtgcggaagtccgtgataacccgggtatttatccgcctgcggatgttcgtgcgaagctgttcactctgaaagtgcaggacccgaaaatcgaccgtgtgcgcacccgcgcgtggaccaaagtgaagagcggaaaataatccgcagccgtagatgccggacgggcgcaccacacccgccggcaattcgcaccatcatggtgcgcttgcacacattcaatgccggagagcagccgtgaatgacgctatccctcgcccgcaggcgaaaacccgtaaggcgctgacgccgctattagaaatccgtaacctgaccaaatcctacgatggtcaacatgcggtggatgatgtcagcctgaccatctacaaaggtgaaatcttcgcgctgctgggcgcatccggctgtggcaagtccacgctgctgcgtgtgctggcaggttttgaacaaccttcggccgggcagattatgctcgatggcgtcgatttgtcacaggtgccgccttacctgcggcccatcaatatgatgtttcagtcttacgcgctgtttccgcatatgaccgtggaacagaacatcgcttttggcctgaaacaggacaaactaccgaaagcggaaattgccagccgggtcaatgagatgcttgggctggtgcatatgcaggagttcgccaaacgcaaaccgcatcagctttccggtggtcagcgtcagcgtgtggccctggccagaagccttgctaagcgcccgaaactattactgctcgatgagccgatgggcgcgctggataaaaagctgcgtgaccggatgcagcttgaagtggtggatattctggagcgcgtcggtgtgacctgcgtaatggttactcacgatcaggaagaggcgatgaccatggcggggcgtatcgccattatgaatcgtgggaaatttgtccagattggcgagccggaagagatctacgagcatccgaccactcgctacagcgctgaatttatcggttcggttaatgtctttgaaggtgtactcaaagagcgtcaggaagatggtctggtactttattcgccgggactggtgcatccactgaaagtcgatgtggatgcttcggttgtcgataacgtgccggtgcatgtggcgcttcgcccggaaaaaatcatgctttgcgaggaaccgcccgccaatggttgtaacttcgcggtgggggaggtgatacacattgcctatctcggcgatctttcggtgtatcacgttcgtctgaaaagtgggcagatgattagcgcccagctacaaaacgcccatcgtcatcgtaaagggttaccgacctggggcgacgaagtgcgtttgtgctgggaagtggacagctgtgtggtgctgacggtttaaggagcaaatatgagtacacttgaacctgctgcccagccaaaaccctttaagctgtggttgtcgcagctgcaaatgaaacatgggcgcaaactggttattgcgttgccatatatctggttgatcttgctgtttctgctgccatttctgatcgtctttaaaataagcctggcggagatggcgcgcgctattccaccttataccgaattgatggagtgggctgacgggcaactttctatcactcttaatctcggtaattttctgcaactgaccgacgatccgctctattttgatgcttatctccagtcgttacaggtggcggcgatttcgactatttgctgtttactgatcggctatccgctggcgtgggcggtggcgcacagtaagccttcgacccgtaatatcttattactactggtgatcctgccgtcgtggacctcgtttctgattcgtgtctacgcctggatgggaatattaaaaaacaacggtgtgctgaataattttctgctgtggctgggggttatcgatcaaccgctgaccattctgcataccaactttgcggtttatattggcattgtttacgcctacgtgccgtttatggtgctgccgatttacaccgcgttgattcgtattgattattcgctggtggaagcggcactggatctcggtgcacgaccgctgaaaacgttctttactgtgatcgtgccgctgactaaaggtgggattattgccggatcgatgctggtgtttatcccggctgtgggcgagtttgtgatcccggaactgctcggtggcccggacagcatcatgatcgggcgcgtgctgtggcaggagttctttaacaaccgcgactggccggtggcctcagcggtagcgatcatcatgttgctgctgctaattatgccgataatgtggttccacaaacatcagcaaaaaagcgtgggagaacacggatgaataatttaccggtggttcgttcgccctggcggattgtgattttgctgttgggcttcacctttctctacgcgccaatgctgatgcttgttatctattcgtttaacagctcgaagctagtgacggtgtgggccggctggtcaacgcgctggtatggcgaattattgcgcgatgacgcgatgatgagtgcggttggtttaagtctgacaattgcggcctgtgcggcgacggcggcggcgatcctcgggactattgcggcggtcgtgctggtgcgctttggcaggtttcgcggatcaaatggttttgccttcatgatcaccgcaccgctggtaatgccagatgtcatcacgggtttgtcgctgttgttgttattcgtcgcgcttgctcatgctattggctggcctgcggaccgcggtatgctcaccatctggctggcgcatgtcactttctgtacggcttatgtggcagtcgttatttcgtcgcgtctgcgggaactggatcgctcgatagaagaagccgcgatggatctcggtgcgacgccgctgaaagtgttttttgtcattacgctaccgatgatcatgcccgcgatcatttctggctggttactggcttttactttgtcgcttgatgatctggtgatcgccagctttgtttccgggccgggagccaccactttaccgatgctggtcttttccagcgtgcggatgggggtgaatccggaaatcaacgccctggcaacattgatcctcggcgcggtcggaattgtcggatttatcgcctggtatctgatggcgcgcgcagaaaaacagcggatacgcgacatccagcgtgcaagacgtggctgaagacactaaaatttgccaacctggctacataatgccgcgcatgtcgcggcattgttttcatggaagacgaaacgttgggattttttaagaaaacatcttcatctcatgctcgcctgaatgtgcctgcgctggtgcaggtggcggcgctcgccattattatgatccgtggcctcgacgtgctgatgattttcaatacgctgggcgtgcgcggtattggcgagttcattcatcgcagcgtacaaacctggagtttaacgctggtctttttgagcagtctggtgctggttttcattgagatctggtgtgcgttttcactggtgaaagggcgtcgctgggcgcgctggctgtatctgttgacacaaatcacagccgcaagttacttgtgggcggcttcgctggggtatggttatccggaactgttcagcattcccggtgaatcaaaacgtgaaatcttccatagcctgatgctgcagaagctgccggatatgctcatcctgatgctgctgttcgttccctcgacaagtcggcggttcttccagttgcaataatgtgtataatcgtcgcccctgatgatgtgaaggtcaatgtatgcagtgcgcactttacgacgcgggtcgctgtcgttcctgtcagtggataacgcagccgattccagagcaactctccgctaaaaccgccgatcttaaaaatctgctcgctgattttccggttgaggaatggtgtgcgccggtgtcaggcccggaacaagggtttcgtaataaagccaaaatggtggtgagtggtagcgttgaaaaaccactgctcggtatgctgcatcgagatggtacaccggaagacctttgtgactgcccgctttatccagcctcatttgcgcccgtttttgcggcgctaaaaccgtttatcgcccgtgcggggttaacgccctacaacgtggcgcgtaaacgtggtgaactgaaatacattctgctgactgaaagccagagcgatggcggcatgatgctgcgttttgtactgcgttctgataccaaactggcgcaactgcgtaaggcgctgccgtggttacaggaacaattaccgcagctgaaagttattaccgtcaatattcagccggtacatatggcgattatggaaggggagacggagatctacctgaccgaacaacaggcactggcagagcgttttaatgacgtaccgctgtggatccgtccgcaaagtttcttccagactaatccggcggtcgccagccagctgtacgccaccgcgcgcgactgggtacgacagctgccggttaaacatatgtgggatctgttctgcggtgtgggtggctttggtttacactgcgcgacgcctgacatgcagttaaccgggatcgaaattgcaccagaggccattgcctgtgcgaagcagtcagccgctgaactgggcttaacgcgtttgcaatttcaggcgctggactctacgcagtttgccaccgctcagggggaagtgccggagctggtgctggttaacccgccgcgccgcggcatcggtaaaccgctgtgtgattatctctcaacgatggcaccgcgttttattatctactccagctgtaacgcccaaactatggcgaaagatatccgcgaactgcctggttatcgcatcgaacgggtacagctttttgatatgttcccgcacaccgcgcactatgaagtgctgacgctgctggtgcagcaataaaaaagccgcaggtgcggctttctgaatcttactgtgggaaccactggtcattgattttctgatatgtaccgtcagctttaattgctgccagcgcgttattcagtttttccagcagagctttgttatccggacgtacagcgatacccaggccggtgccgaagtattgcggatcggtcactttttcagtagcaacgcccagttgcggattggttttcagccattcgtttaccactgcggtgtcaccaaatacgccatcaatacggccatttttcagatctataaaggcattctgataactgtcataggagacagtttttacttccgggtgctgatcctgaatatatttctggtgcgtggtgccgttttccatcccaatacgtttgcctttcagatcggcaaacgttttgtaggtatcttttttggcaatcacgacggctgagttttcgtagtagggcgtggtaaacgatacctgtttgctacgctccggcgtgatatccattccggagattacggcgtcatattttctgaatttcagtgacgggatcaggctgtcgaacgcgtgattagtaaaagtacattctgcctgcatttgtttgcacaaggcttttgccagatcgatatcaaagccgacaatctcattattagcacctatagattcaaagggtggataggtggctgaaacgccaaaattgattttctctgcggcagaagcaccgaaagtaaaggaagcaagtaaagcggcaagaactaactttttcatgatggaactcccgtctgtcaatcttatgatttttggccgtgtctgcggcatgggataacaatgccatcaagtgaatttatatgcaataaatatgagtaaataatttgtatgaaataaaaaaagacggacaacttagtgggttggccgtcttcattataagaatttatgcactgtgcaggtcgggtaaggcgtccacgccgcatccggcatcagcatgcagctacattaattccgccgttcgaatgccagtgctttacgctcgatcagacgcatcatcagcgtcagcaggccgttgacgaccaggtaaataatccccgccgcgccaaataccattacatcgtaggtgcgtccgtacaataactggctgtatcccatcacttccatgagcgtaatggtgtaagccagagaggtacttttgaacaccagcaccacttcgttggaataagaagagagcgagcgtttaaacgcgtacggcagcaggatcgccagcgtatcttttttgctcattcccagggcgctacaggactgccattgaccttccgggatcgcgcgaatcgcaccgtaaaacagctgcgtggtgtacgccgcactgttcagcgacaacgcaatcagcgcacataaccacggttctgacaacaaatgccacagtgccggatactcctgcaacgttgggaactggcccggtccgtaataaatcaggaagatctgcaccagcagcggcgtaccggtaaacagcgtgatatagccccgcaccagccacaccagcaccggcgttttcagcgtcaggatgatggtaaaaatcaatgccagaatcagtgccacaatcagcgaggcaacggttagcgtcaggctggtgtgcaaccctttcatcagttcgggtaaatactcaaacattagctgggcctccgctcaaaacgtgtcgcgcgcaggtcaatgcgtttgagaatgtactgactgagcagggtgatcaccaggtaaatcgccgccgccacaatgtaccaggtaaacggttcttgggtacgggtagcgatgcttttggtttgtagcattaaatcattcacactaatcaaactgaccagcgcggtatctttcagcagcaccagccactggttaccgagacccggcagcgcatgacgccacatctgcggcatcaccagacggaaaaagatagccgatttcgacagccccagcgcctgaccggattcccactgacccaccggcaccgcttttaatgcaccacgcagcgtttgcgaggcataggcggcatacagcagtgacagtgcgatgacaccacaaaggaacgggctaacgtcgaagttctcaatgtccatctgcaccgggatctgcacgaacccaagattgatagtgaagccatccgaaagcgtcagcagcagctgcgaggagccaaaatagataaacagcaccaccagaatttctggcaggccacgcagaatggttaccagcgctgaacctgcccacgcgacaggacgccatttcgcagactcccataccgcaaagaacatcgccagcgccagcccgacaatcaatgcacaaacggcaaggccgacggtcatcccggcggcgcttgctaaaggaaaaaattcattcatcaggaattacttctggaaccatttgttgtagatggtttcgtaagtgccatctttcttcactttttccagcgcagtgttgagtttctgctgcagttcagtgttgccctggcgtactgcgatgccgaggccagtaccgaagtaatctttatcggtcactttatcgcccactgccgccagtttcgggttatctttcagccattcggttaccactgcggtgtcaccaaatacgctgtcgatacgaccgttttgcagatccagttttgcgttctggtaactgtcatatggcacggtagtgatttccggatgcttatccataatgaacttctggtgtgtcgtcccgttctgaacgccgacttttttgcctttcagctgatcaacactggtgtatttgccttgctgacccacaaacagggcagagttgtcatagtacggggtggtaaacagcacctgcttttcacgctccggagtgatatccatgcccgccatcactgcttctacgcgacggaatttcaggcttgggatcaggctgtcaaacgcctggttagagaaagtgcaggttgcatcaatctctttacacaatgcctgcgccaggtcgacatcaaaaccaacgatctggttgtttgcatcaatcgattcaaacggaggataggaggcttcggtggcaaaacgaatggtttcggctgctgtggcggaaagactaaaacctgcaattaacgcggcaatcagaacttttttcattgttgttatcccgaatcttagtgagagagatagtttttaaatgcttcggtttgcggctcggtaaagcagctcgcgtcgccttgttctacgatatgaccgttttccatatacaccactcggctggcggttttacgcgccacttcaacttcgtgggtgacgatcacctgggtaatattcgtttctgccagctcacgaatgatgctgacgatttgtgccgtaatttcggggtccagtgcggcggtcggttcatcgaacagcagtacctgcggttccatcatcaacgcacgggcaatagcaacacgctgctgctgaccaccagaaagatgcagcgggtaacgatcgctataaggtttgagacgcagacgttccagcagtttttctgcacgggccagcgcctgatctttactcaaccccagtacacgacagggcgcttcaatcaggttttgctgcacggtcagatgcggccacaggttgtattgctgaaacaccatgccaacgttacgacgcaaatcgcgaatcgctttgtcagagggggttttggtgaaatcgaaatggttgcctgcaatgttgagcgtaccggagcgcggcatctcaagcagattgagtacacgcagcagcgagcttttacccgcgccgctggggccaagtaacaccagcgtttcgccctgtgggcaatccagcgtgatatcgaacagcgcctgatgcgcgccgtagaagcaattaatgccgtttaattgaatactcattgacactcgtatactggcagtctgatagctattgaggtcgaagatagtacctttgacagaataattatgcaatatttctgctttaaaagttaaaagcaaagcgcattattcaataaacatagcacaaaataacgggggcggtggtcggcgagcataaatgtcggcattcctcacgaaatgccggacaatttacggggtttattggttgatcaagacgttagcgattctcgatggactgacggagcgtacccgccgtggcatgaacgctaccgcctaagtagcgcacatcgtcgatgacccaacactggccttcctgaatcattaacacttcatcctgccagccctggtcaccctgcttgagatccacgcgcaatggaatgttacgggcatcacgattagggatagtagatgcactggcaacgtgggcgctgtctggcaaggtggttcgactggagaacggatcgctgcttaacaattcacgatgactattatcgcggctggcatcgctaagtagggttgccagtttgtcactcaaataggggcgcagagcggtaatgtcattgccgcgatgttgaatgcggtagtcatagaactgttgagccacgctatcaggccccccctggacacaggaaccggtgcgggggccgttatctttataagctggcgtgacggtggtacaggcactgagtagcagtgcgcaagggataagcatggtcaatttgctatagcgcatgatgatttccttataagcgaacaccttgaaagcgttctacgataataatgatatcctttcaataatagcgtatcagtccgataatgctttgaagatcgaaggcttagcaaacaaggagatcgatcatgcaattttctacaaccccaactctggaaggccagaccatcgttgaatattgcggtgtggtgactggcgaagcgattttaggcgcgaatattttccgtgatttctttgccggtatccgcgatatcgttggcggacgctccggtgcctacgaaaaagaactgcgtaaagcgcgggagattgcctttgaggagctcggctcccaggcgcgagcgctgggggctgatgccgtcgtcggtattgatatcgactacgaaacggtcgggcaaaacggcagtatgctgatggttagcgtcagcggtacggcggtgaaaacgcgtcgatgagaagagtcttctggctggtcgctgccgctctgttactggcagggtgcacaggcgaaaaaggcattgtcgagaaagagggatatcagcttgatacccgacgccaggcgcaggcggcgtatccgcgcattaaagtgctggtgatccactacaccgcagatgattttgatagctcgctggcgacactgaccgataagcaggtcagctcgcattatctggtccctgcggtgccaccgcgatacaacggtaaaccgcgcatctggcaactggtgccggaacaagaactggcctggcatgcggggattagcgcctggcgcggggcaacgcgccttaacgacacctctattggcattgagctggaaaaccgtggctggcaaaaatcggcgggagtgaaatattttgccccgtttgaaccggcacagattcaggcgcttattccgctggcgaaagatattattgcccgttatcacatcaagccggaaaacgtagtagcacatgcggatattgcgccgcagcgcaaagacgatccggggccattattcccctggcagcaactggcacagcaggggattggtgcatggccggatgcgcagcgggtgaacttttaccttgccgggcgcgcgccgcacacaccggtagagaccgcgtcattgctggagcttttggcgcgttatggttatgacgtaaagcctgatatgactccgcgcgagcagcggcgcgtgattatggcgttccagatgcatttccgcccgacgttatataacggcgaagcggatgcagaaactcaggcgattgccgaagcgttgctggagaaatacgggcaggattagcgcggcagttttccgtggtcgcgtagccaggcggcagttttctcgataccttcatccagggtgaggactggttgataacctaactcttcctgcgcacgcgtaatatccagcgtaaagtcaaaattcaacttggagacgccgtagtgggtcagcggcggctcttttgctgacttgcggcctaaacgctccatgctgcgggcgatcatatccagcatcgggtaagggacggaacgaatacgacagtcaatattcaattcgtctatcagcttctgcacgatgctgcgcagtgtgcgatgctcgccgttggtgatgttgtacacacgcccggaaggtagcttatcgcaggcttcctggcttgccagccacatggcgtgcacggcattttcatagtaggtcatatcgaccagcgcactgccgccatgcggtaacagaatactgccgtagtgatgcatcatatgcgccagacgagggataaagactttatcgtgcggtccgaacagactttgtgggcgcagaatagtaaagcgcgtttgtggattcgcctgcgaaagcatattgatcacttcttcactagctgctttgctgcgggcaaactcgttggcgaagcggtgagggcgaaaatcttctttaatatcgcgatggtggtgataatcgaagtacagggagggagaagagatatgaataaagttacgcacaccccaggcgacagcccattcacccaggcggcgagtggcacgaacgttagccagatcgaaagcctgttgtgtcccccagggcgaggtaaagctggagcagtgccacagcgtatcaatgcctgcgagcatcactttagcttgtgatgagaccagctcggtcagatccgccggaacaaactctgcgcccattttttccagcaatttacccattgcctcgttgcgaccggtcgctcgcacgctgatgcctttctggcataaaaactctaccgcgtttcgacctaagccgctggtggcgccggtaaccagtaccttcatatcaatccactgttgttgagaaaataacgtgcgcattcttccgtgatttcctccatgatgcaatgggaaacatgaaagaataacgcaggttttgtcgattaatctgtgctttgttctgccagtctggcgattcgttttgccattccgcgaaaaataaacagatgcgcggggatcatcaataaccagtaaaacaaccctggcataccgtgcggatgccagaatgcgcgaacatcgatagtacgatagtcacctttatcttccagggtaaaacacagtcgtcccagccccggcgctttcatgccaaataacagcgtaagttgtttttgcggttcaacgacaatcactttccagctatccaccgcatctccggtctgcaaatattcacgctccgggcggcctttcgccagcttatgaccgatcgcgcggtccatcaacgcccgggtttgccacaaaatattgccaaagaaataacgctctttaccgccgatttgattcaccacctgccataaagccgcaaggctggcggacgttttaacggtaaaccccgcctgtttggcgaaataaccgtactccggtcgccagcgggcaaaggcctgagcgtcgtagccccagtcgctggagttgaccagcttttcttcctctttcaacgtgctacgtaccgcgtcatcgaaagcgatcagccgttgtgggatgagcgcacgtagcgcggtgtcatccgccagcagatcgtgtttcagcccctgaatcaacgccctggcggtggtgggcggtactgaagtaatcacattaagaaaccacaccgaaatccagcgggtggggagggggatggggagcaaccagcggcgcttaccgctcaccgccataaaatgttcaaactgttgctgataactgagcacttctggtccggcggcttcgaagatgcggtgttcgcaggccggatgatctaacagcgccaccagatagtgcagcaagttttccagcgcgatgggcgttgtgcgtgaacggacccagcgtggcggcgttaacactggcaggttgtagaccatatcgcgcatgacttcgaacgccgctgaacctgcaccaacgattattccggcacgcaattcggtcaccgggacacccgcttcacgaagaatatccgccgtagcctgacgggcgcgcagatggtccgactgctcatgtggcggggcctgcaacgaactgagaaagattaattgctttaccggtacttcgcgcagcgcatcgcggacgttgagagccacctggcgctcctgagcgataaaatcaccgccttctcccatgctgtgcaccagaaaatagaccgtatcgatatcctgcaacagggccggaaggttatccggccagctgagatcgactttatggcaactgacatttgccagttgcagctttgcaagcctgtcgacatgacgtgccgccgccaggatctgatgcccctgctggctgagtgttcgcaccagatgctgaccaatgtagccactggcaccgagaactaaaatgcgttgcggcacgtctccctccttaacgcgccaggaatgcgcgccagtgggcggcgacttccgccagctgagcgcgcgagacgtcaagatgcgtcaccaggcggacaatcggcgaggcgttaatcagtacgtttctcgctttcatgtattcgcctaacgcggcagcattttcttccccgacgcgaacaaacagcatattggtgtcctgacgcatcacatccgcgcctgcttcacgcagttgcttcgccatccaggcggcgttgtcgtggtcttcctgcaaacgtgcgacgttatttttcagcgcatacagcccggcggcagccagaatgccggactggcgcatcccgccacctgtcattttccgccagcgaatggcacgtttaatgtaatcacgattaccgacgagtaatgaaccgactggcgtcccaagacctttcgacaggcaaatggtgaacgagtcacaatattgtgtgatctctttcagttcgcagccgtaagccaccacggcattaaagatgcgcgcaccgtcaacatgcagcgccagattgcgcttgcgggtaaattcccatacctcttttaagtattcacgcggcagcactttgccgttgtgggtgttttccagactgagtaatttggtgcgggcgaaatggatatcgtcgggtttgattttcatcgccactttatccagcggtagcgtgccgtcggcagctgcgtcgatgggttgcggctgaatactgcccagcactgctgcgccaccggcttcaaacagatagttatgcgcggcctgaccgacgatatactcttcgccgcgttcgcagtgactgagcagagcgaccaggttggcctgagtgccggtaggcagaaaaatggcggcttctttaccggaaagctcggctgcatagtcctgcagagcattaacggtagggtcgtctccgtaaacgtcgtccccaaccggggcggccatcatcgcttcgagcatggcgcggctcggtcgggtaacggtatcactgcgtaaatcaatcatggcatgtccttattatgacgggaaatgccaccctttttaccttagccagttcgttttcgccagttcgatcacttcatcaccgcgcccgctgatgattgcgcgcagcatatacaggctgaaacctttggcctgttcaagtttgatctgcggtggaatggctaattcttctttggcgaccaccacatccaccaacaccggaccgtcgatggagaaggcgcgttgcagagcttcatcgatttcagacgctttttctacacgaatacccgtaatgccgcaggcttcggcaattcgggcaaagttggtgtcgtgcagctcagtaccgtctgtcaggtagcctccggctttcatctccatcgccacaaagcccagcacgctgttattaaagacgataattttcactggcaatttcatctgcattactgagaggaaatcgcccatcaacatactgaaaccgccatcgccgcacatggcgaccacctgacgttccggctcggttgcctgcgcacccagcgcctgcggcatggcgttagccatcgaaccgtggttaaacgaacctaacagacgacgcttgccgttcattttcagataacgtgccgcccacaccgttggcgtaccaacgtcacaggtaaagatggcgtcatcggcggcaaaatgactaatttgctgcgccagatattgcgggtgaatggctttctcgctcggtttagctaaatcatccagccctttgcgggcgtcgcggtaatcttccagcgctttatccagaaacttgcgatcggttttttcttccaccagtggcagcaatgcccgcagggttgatttgatatcgccgaccagcgccatatctaccttgctatgcgcgccgatgctggctgggttgatatcaatctgaataattttggcatcggtcgggtagaacgcgcggtagggaaattgcgtgccgagcagcactaacgtatcggcattcatcatggtatggaaacctgacgagaagccgattaatcccgtcattccgacatcatacggattatcgtattcgacatgctctttaccgcgcagggcatgaactataggcgctttaattttcccggcaaactcaactaactctttatgcgcccccgcacagccgctgccacacatcagggcgatattgctggaataacgcagcagttgcgccagtttgcgtaactcttcttcttccggtgttactaccggctgtggcgcatgataccagtgggtagttgccccttctggcgcaggttttaacgccacgtcgcccggtaacacaacaacggaaacgccacggttaagcaccgctttgcgcatagcaattgccagcacttgtgggatctgctctgggctggaaacaagctcgcaatagtgactacattcgcggaatagctcttgtgggtgggtttcctggaaatagccgctgccaatttcgctggagggaatatgagcggcaatcgccagtaccggaacgtgattgcggtggcaatcgaacaggccgttgattaagtgcaggttgccgggaccgcacgatccggcacagaccgccagttctccgctaagttgtgcttcagcgccagcggcaaacgccgccacttcttcatgccgggtggacatccactcgatggtgcccatgcgattaagactgtcactaagaccgttcagagagtcgcccgtgactccccagatgcgtttcacgcctgccgattcgagtgttttggcgatataagctgcaaccgtttgtttcatggttctccatctcctgaatgtgatgacggtaacaagtttagttcatctgacggagggggaagggatgggagaaaaaggaggcactaacggttaaatagcccgatgaaaggaatatcatcgggcatcaggcgattatgcgagaaccaaatccccctgcggatggcaggagcaggccagtacgtaaccttcagcgatttcggcgtcggtcagcgtcattgtgctgctcaccgtatattcaccggaaatcactttcgtcttacagcagccgcaaacacccgcacgacaggcggcgacaaccggaacgttattgctttccagcgcctccagtagcgtggtgccaaccggagcgtaaaattctcgtgccggttgcagtttggtgaatttcagaccgctggtcgccgcttccgctactggggtgaagaatttctctttaaagaaacgcgtcacgccgagcgctttcacttcctgctctacccaatccatatatggcgcagggccacaggtcatcacggtacgtgaggctaaatcagggacacctgccagcagttcgcgagtgagacgaccagcgataaagccttcggtaacgttattttccgccaccagcgttaccggatagttacgccactcatcggcgaaaatcacatcctgcggcgtacgcacgttgtagatcacctgcacatcggcctgtggacggttcttcgccagccagcgacgcatcgacataatcggcgtaacgccgcagcctgccgccagcaacaggaatttatcttctgctttatcgtcgcaggtaaattcccccatcgcgtccgaaagccagagataatcaccgcgttttacatcgcgcgtcagccaccgagagccgacaccgtcatcaatccgccgcacggtcagggtgatgtattcactcacgcctggcgtggaggaaatggtgtaagcacgcagcgtttccgctgagttacgcacgctgaccagcgcatattgcccggcgcgatacgggtagtaatcgtggcaaatcagggaaatcgtccacacatccggcgtttcttgcgtaatgtgatgaacctgcatccgccacgggcattgattcgttggcatcgtcatcgacaaactccttacgcgctcaacagttgcttcatgtcttcttcaacagtggtgatagaacgcaggccgaatttctcgttcagcaccgccagcaggtctggtgtcaggaaaccaggtgcagttgggccggtgacgatatttttcacacccagagaaagcagcgtcagcagaatgacaatcgctttctgttcaaaccaggagagcaccagcgacagcggcagatcgttcaccccacagcccagtttctctgccagcgttaccgccagaataattgctgagtaagcatcgttacactgaccagcatctaccagacgcggcagaccttcgatatcgccaaactcaagtttattaaagcgatatttaccgcaagcgagggtcaggatcaggcagtcatccggcacgctggtggcgaaatcggtgaagtagtgacgctcgccgcgtgcgccgtcacagccgccaagcaggaagatatgacgcagtttttcacggctcaccagatcaatcagcgtatcggctgcgccaagcagtgtctggcgaccaaagcccacggtgatcaggtgcggaatttcgctgtacgggaagcccgccatctgttgcgcctgggcaatgaccgcagagaaatcttcgccatccagatgacgcacacccggccagccaacgatgctgcgggtccagatacgatcgtcataagcgcctacggttgggtcgatgatgcagttcgaggtcatcacgatggggcctgggaaacgagcgaactccacttgctgattctgccagccgctgccgtagttaccgaccagatgcttgaatttacgcagctccgggtaaccatgcgcaggcagcatttcgccgtgggtgtagacattaacgcccgtgccttcggtctgttccagcaggttgtagagatctttgagatcgtgaccggaaatcagaatgcatttacccgccgtcgctttgacgttgacctgggttggcgtcgggtgaccgtatttaccggtttcgcctgcatccagaatgctcatcactttgaaattcatctggccgatttccattgaacactcaagaagcgcgttcatatcggcaggccaggtccccagccacgccatgattttatggtactgggcataaatatcgttgtcgtattgaccgagaacatgcgcgtgttccatataggccgccgcacctttcaagccatacaggcacagcagacgcaggccgagaatgttttcgccaatcgccgctttatctttgttaggggtaaattctgctgcctgacgttgcagctcgccgagatcgtcgctcaccagttgcaggtcagccatcgggttatcgacgcgggcgttggcatctacagccaggcattgtgctttcagcgcctcgcgcagggcaatcgcttcacgagcgtagccgacaatacgcggagaatcgaagttaacgttggtcagggttgagaaaaaggcacgtggcgcaaagctgtctacatcgtggttgatgatgccgtattcacgtgctttcactgcccaggccgaaagcccttgcagcgtcgcgatgagtaaatcctgaaggtcagaggtttccgccgttttgccacacatcccctgcgcgtatgagcagccgtttcctgccggagtacggatagtttgttcacattgcacacaaaacatgatcacaccttttaaagttatatttaatatacatgtttaaggttaagacgcttaacgcggggataaaagagatttttaatgcaactttaagggagattgatttagcgcaattttggcggcagagatctaccgccagagaggtattatgcagagaaaaaggcgatgagaatcggcactaacagactaagaataaaaccgtgaacaatcgccgccgggaccatatccagcccgcctgtacgttgaagaacgggcagggtgaaatccatcgacgtcgcaccgcataagcccagtgcagtagagcggctacggcgaatcagcccagggattaacataatagcaatcagctcacgggccagatcattaaaaaacgccgcgctcccgattaccggaccaaaggattcggtcaataaaataccggaaagagaataccagccgaaaccggaggccattgccagcgcggtattgatgggaagatcaagaataaaggcgttaattaaaccaccaattaatgaactggcaaccaccaccacggcgacaatcattccccggcgattaaggacaatctgctttaaggtcatgccattattgcgcaactgaataccgacgaggaaaagtagcagaattaaggtgtattcactggcttcggtcgcgtgttgtaagaaagccagtccactcagaccaatggcaaaaccaatcactactacgccgcacagttttagcgactccagcgccatcgcaatacgcgacgggagtttttcttgatgatggtggttgcgccatggcaggccgcgctccagccacatcagggcggcaatattacacagtaaaataacggtaatactgacggcagaataatgcagaattgccaacaagttactggcgaggttatcgagaaacgccagactgatacccataaaaaagagaataaggtaaaccatccaacttaatagctgattaataactcttaatgcagctttttggcgaagcggaatgaggtaacccacaatcaggggaaccagaatgattaacagcccagaaaacatgaaaaaccagtccttgcaaagaagattcgaaatgcgcgatgacacactactgaaagcggaaggacgagtaaagttgcaattaaaaggaaatgttatgcataaggatcggtagggtattcattttcatttaaagatattcttgcgctttaattacaaaccgcaccggtgttggtggcgtcaaaatcgccgaggcgttccctgaaggccggggcagcccacatggatgtgggctgagggcgcgttttacagggatgttacctcgcgcccgacccggtagccgtaagggataagtcgagggcaccgcgcagcggcgattttgttcgccagagcccgggggtgcagggggcggcggcgattggccgccccctgcacgctccttgcgccagtggcaatatgtggcttagctcatgaaaggagcgcaacaagatgatgaatcaacatataacaacatcttaaaaaaaggcctgacattgcgccaggccttctgcgttaattaatcgcgtttttccagtagagtccggtaaatcagaccaccgataataccgccgacaattggcaccacccagaagaaccacagttgttctaatgcccagccgccctggaagatagcaaccgcagtactgcgcgccgggttaacggaagtgttagtcaccggaatactgattaagtgaatcagggttaaggccagaccaatggcaattggcgcaaaaccagcaggagcgaatttgtcagttgcgccgtggatcaccagcaggaaacctgcactcaataccagttcaactaccagcgcggaaagcatggaataaccgcctggtgaatgctcgccataaccgttagaagcaaaaccgctggctgccgcgtcaaaacccgttttaccactggcaattaaatacagcagcgccgccgcaacaataccgccgacaacctgggcaattacgtagccaacgacttcttttgccgggaaacgtccgccagcccataaaccaatagtgaccgccgggttaaaatgaccaccagaaatatgaccaacagcaaaggccattgtcagaacggtcagaccgaacgccaacgccacgccggcaaaaccaatgcctaattccgggaagcctgcggccagtacggcactaccacagccgccaaaaacaagccagaaagtaccaaaacattcagctgctaattttctgaacatatccacctcaattaaaaattgaccctgtgaaaaatatggtcgttttatagggtcgtcgtaaaaaagtgacgacggaaatgatgcgcggctattttaaaaacgaaggcaagtcattcaccagataaataaatccagtaaatttgatttaaggcaacagcgggttgccccatatagtcatttgtctgattgacagtgtagtgcaagcgaaagatttaatcctttaggcgtaataaaaaataatttatcatgctaattatttgattttgttgtttttgcagacttgtcagcaagagggagtataacgcgattattcgctcatttttcagacatttgccatgcttaaatgtgatgtcatcacgtattagcatggcctttcccgttatactgccagcgtaaaggataagtcacatatttctggaggggatatgattcttgagcgcgttgaaattgtgggttttcgcggtatcaaccgtttgtcgttgatgctggaacaaaacaacgtcctgattggggagaacgcgtggggtaaatccagcttgctggacgccttaaccctgctgctatcgccagaatcagaactctaccattttgagcgcgacgatttctggttcccgccgggagatatcaacgggagagaacatcatctgcatattattttgaccttccgcgagtcgctgccaggccgacatcgggttcgccgctatcggccgctggaagcgtgctggacgccatgcaccgatggttatcaccgtattttttatcgtctggaaggggagagtgcggaagacggcagcgtgatgacactgcgcagttttctcgataaagacggacatccgattgatgttgaggatattaacgatcaggctcgtcatctggtgcgtttaatgccggtgctgcgcttgcgtgatgcccgttttatgcgccgtattcgtaacggcacggtgccaaatgtccccaatgtggaagtcaccgcgcgccagctcgatttcctcgcccgtgaattatcctcacatccgcaaaatctctctgatgggcagattcgtcagggactttccgcaatggtgcaacttcttgagcattatttttctgagcagggggccggacaggcgcgatatcgtttaatgcggcggcgagccagcaatgagcaacgaagctggcgctatctggatatcatcaaccggatgattgaccgacctggagggcgctcgtatcgggttattttgctcggcctgtttgctactttattgcaggcaaaaggcacattgcgactggataaagacgcccgtccattgttgctgatcgaagatccagaaacccgtttgcaccccattatgctttcagttgcctggcatctgttgaaccttctgccattgcagcgcatcgctactaccaactcgggagagttgctttcgttaacgccggtagagcatgtttgccgactggtacgagagtcctctcgcgttgccgcctggcgtctgggaccgagtggcttgagtaccgaagatagccgacgcatctcctttcacattcgttttaaccgtccgtcatcgctgtttgcccgctgttggctgctggtggaaggggaaacggaaacctgggttatcaatgaactggcgcgtcagtgcggacatcattttgatgccgaagggatcaaggtcattgagtttgcccagtccggactaaagccactggttaaatttgcccggcgaatggggattgaatggcatgtactggtcgatggcgatgaagcagggaagaaatatgccgctacggtacgcagcctgttgaataacgatcgggaagccgaacgagaacatttaacggcgttaccggcgctggatatggaacattttatgtatcgccagggattttccgatgtgttccaccgcgtggcgcaaatcccggaaaatgtaccgatgaatctgcgcaaagttatctcgaaagcgatccatcgctcttccaaacccgatcttgccattgaagtggcaatggaggccggacgtcgtggtgtggactccgtaccgacgctgctgaaaaaaatgttctcacgcgtgctgtggctggcgcgcggtcgggccgactaactacaaaacatcgtggccatttgtggctgaatagcgtcgagcatctcatagcgccgacggtattcagcccgttttttactggcgatttcggcaatctcttttcgtgctatctgtgctggaaggcggtaatggcgttcagcatcacatacgccgccaaccgattcccagaaagcgttgtaatcggcatggatcttgccttctttatcgcgataacgcaggctgcggtaaatatgcgtttcattgctgacggcaataatctgctctacctgcaaacgttgggcaaacagacaggccgcttccatcacgaggcgtttgggaaatagcccgtggcaggctttcgtcgcattctggatttcctggtgtggaatttcccattttgcgccttgcagtccgccaataaacatcgtccttttcccctgatattcacacagggtaaaagtgagctctgccagaggaataccttcgctgttgcggaacaggatggtgctgtcaccttctttatccattgagatcatcatggtcagctcaagcgtgaactgctcgccgtttttgccttccagcttcgccagttgcagcccgggggtattcaaatataagctgaattcttccgccgacatacacccgcggagtaacgcataatggtaacgtaacgcctccagcaattgcttacggctaagattcgccgcaaggtaagggcgatgcagacgtacaggcagtcgcggctggcgcgttaacaacacattgagattaggccagtgggaaagttcgttcatccactcaacgcttaaacgcggcataatcaacgagcgcagcaaaaatttctggcgaaaactacggcgatgccagaatttacccggccgacactgtcctcgtgccagactaagaaaaagtgacaggctgctgagagattcagatggcgtaaaggtccgttcagttagctgcgacatattcatgaaatcaatggttatacatgacgtcgatttaaccattgcgtatcttaaccaaacatcaatagtgtgattattaacgtaaattttagtgttttgttgatatttcgttgaagttaatgacccggattggcatatggagtattcagaatatttatgaaaaagcggaaaaccgtgaagaagcgttacgttattgcgatggtgatagtcatcgccgggttgattacgttatggagaattcttaacgcacccgtgccgacttatcagacgctgattgtgcgccccggtgatttacagcaaagcgtgctggcgaccggaaagctggacgcgctgcgtaaggttgacgtgggcgcgcaggtcagcggtcagttgaaaacgctgtcggtggcgattggcgataaagtaaaaaaagaccagcttttaggggttattgatcctgaacaggctgaaaaccagatcaaggaggtggaagcaacgctgatggagctacgcgcgcagcggcagcaggcggaagcggagctgaaactggcgcgggtgacgtattcccgtcagcaacgtcttgcacaaacgcaagcggtttcacagcaggatctcgataacgccgcgacggagatggctgtgaaacaggcgcaaattggcaccattgacgcgcaaatcaagcgcaatcaggcctctctcgatacggctaaaaccaatctcgattacacccgcatcgttgccccgatggccggggaagtcacgcaaatcaccactctgcaaggccagacggtgattgccgcacaacaagcaccgaacattctgacgctggcagatatgagcaccatgctggtaaaagcgcaggtttctgaagcggatgtaatccacctgaagccggggcaaaaagcctggtttacggtgcttggcgatccactgacgcgctacgaggggcaaatcaaggatgtgctaccgacgccggaaaagattaacgacgctattttctattacgcccgttttgaagtacccaaccccaatggtttactgcggctggatatgaccgcgcaagtgcatattcagctcaccgatgtgaaaaatgtgctgacgatccctctgtcggcgttaggcgatccggttggcgataatcgttataaagtcaaattgttgcgtaatggtgaaacacgcgagcgtgaagtgacgattggcgcacgtaacgataccgatgttgagattgtcaaagggctggaagcgggcgatgaagtggtgattggtgaggccaaaccaggagctgcgcaatgacgcccttgctcgaattaaaggatattcgtcgcagctatcctgccggtgatgagcaggttgaggtgctgaagggcatcagcctcgatatttatgccggtgagatggtggcgattgtcggcgcttcgggttccggtaaatcgaccctgatgaatattctcggctgcctggataaggccaccagcggcacctatcgcgtcgccggtcaggatgttgccacgctggacgccgatgcgctggcgcaactgcgccgcgagcatttcggctttattttccagcgttaccatttgctttcgcatttaaccgccgagcaaaacgttgaagtacccgccgtctatgccggtcttgagcggaaacagcggctgcttcgcgcccaggagttactgcaacgactggggctggaagaccgtacagagtattacccggcacagctttcgggtggccagcaacagcgcgtcagcatcgcgcgggcattgatgaacggcggtcaggtaattcttgccgatgaaccgaccggcgcactggacagccattctggcgaagaggtgatggcgatcttgcatcagctgcgcgatcgcgggcatacggtgattatcgtcacccacgatccgcaggttgctgctcaggccgagcgggtgatcgaaattcgcgacggcgaaattgtgcacaatcctcccgccgttgaaaaagtgaatgctactggcgggacggaacctgttgtcaacacggcgtctggctggcggcagtttgtcagcggttttaacgaggcgctgacgatggcatggcgggcgctggcagcgaataaaatgcgtactttactgaccatgctggggattataatcggtattgcgtcggtggtttccattgtcgtggtgggcgacgccgccaaacaaatggtactggcggatattcgttctattggtacgaatactattgatgtctatcccgggaaagattttggcgatgacgatccgcaatatcagcaggcgctgaagtacgatgacttaatcgccatccaaaaacaaccgtgggtcgcttcagccacacctgccgtctcgcaaaacctgcgcctgcgttataacaatgttgatgttgctgccagtgccaatggcgtgagcggcgattattttaatgtctatggcatgaccttcagtgaaggaaacacctttaatcaggagcagctgaacggtcgtgcccaggtcgtggttctcgacagtaatactcgccgccagcttttcccccataaagcagatgtggttggcgaggtgattctggtcggcaatatgcccgccagagtcattggtgtggcggaagaaaaacagtcgatgtttggtagcagtaaagtgctgcgtgtctggctaccttacagcacgatgtccgggcgagttatgggccagtcgtggcttaactccattactgtcagggtgaaagaaggatttgacagcgccgaggcggaacagcaactcacgcgtttactttcactgcgccacggtaagaaggatttctttacctggaacatggacggcgtcttgaaaaccgttgaaaagaccacacgtactttacaactgtttctgacgctggtggcggtgatttcgctggtagtgggcggtattggtgtaatgaatattatgctggtgtcagtgaccgagcggacgcgggaaattggcattcgcatggctgtaggtgcgcgagcaagcgatgttttgcaacagttcctgatcgaagccgtactggtttgcctggtcggtggcgcgttgggaataacactgtcactgttaattgctttcaccttacagcttttcttacccggctgggagattggtttttcaccgttggcgctgctgctggcgtttctctgctcgacggtcaccgggattttatttggctggttacccgcacgaaatgcggcacgactggatccagtagatgctctggcacgagagtaatttttgagataaaaatgccagccgatcgggctggcattttgcctttaggatgtacacaatgagacagaagagctatgcgactgccgcttctacttcgacgggcacaataacactggcgtgattgccttttggcccctggtggacatcaaactgaacggattgtccagcttttagcgttctgtaaccatccatctgaatggtagaataatgagcgaaaatatcttcgccgccgccttcagggcagatgaaaccaaaccctttggcattgttgaaccacttaacagtacccttttccatgcttcgacatccttcgcaaatcttatacaagtaagatggaataaaccggggtcagagagggggctgttcaaaacctcgccaactctagaaatacaatttagagaattagggcgagccgtcaagcatttgacaggggccagggggcaggtatgaatcaaaaatttgaagcagttaacgctattgacaggaatgtgacagatgtcgctgatgctaacgatagatgatagttatctatcatgtggagtaaattggtcaggcaaataagctcttgtcagcggcagggcgttctgccgataaccgtaaccgaagatgataactgacaatgggtaaaacgaacgactggctggactttgatcaactggcggaagaaaaagttcgcgacgcgctaaaaccgccatctatgtataaagtgatattagtcaatgatgattatactccgatggagtttgttattgacgtgttacaaaaattcttttcttatgatgtagaacgtgcaacgcaattgatgctcgctgttcactaccaggggaaggccatttgcggagtctttaccgctgaggttgcagaaaccaaagtggcgatggtgaacaagtacgcgagggagaatgagcatccattgctgtgtacgctagaaaaagcctgaatgcaggcataaaaattgggggaggtgcctatgctcaatcaagaactggaactcagtttaaatatggctttcgccagagcgcgcgagcaccgtcatgagtttatgaccgtcgagcacttgttactggcgctgctcagtaacccatctgcccgggaggcgctggaagcgtgttctgtggatttggttgcgctccgtcaggaactggaagcctttattgaacaaaccacacccgttctgcctgccagtgaagaggagcgcgacacacagccgacgctgagttttcagcgtgtactgcaacgtgcggtcttccatgtccagtcctccggtcgcaatgaggttaccggtgcaaacgttctggtcgctatctttagcgaacaggagtcgcaggcggcatatctgttgcgcaaacatgaagtcagccgtctcgatgtggtgaactttatctctcatggcacgcgtaaagacgagccgacacagtcttctgatcctggcagccagccaaacagcgaagaacaagctggtggggaggaacgtatggagaatttcacgacgaacctgaatcagcttgcgcgagtgggcggaatcgacccactgattggtcgtgagaaggagctggagcgtgctattcaggttctctgccgtcgccgtaaaaacaacccgctgctggtgggggagtctggtgtcggtaaaaccgcgattgcggaggggcttgcatggcgaattgttcagggcgatgtgccggaagtgatggctgactgtacgatttactctctcgatatcggttctctgttagcgggcacaaaatatcgcggcgactttgaaaaacgttttaaagcgttgctcaagcagctggagcaagacactaacagcatcctgtttattgatgagatccacaccattatcggtgcgggtgcagcgtctggtggccaggtcgatgcggctaacctgattaaaccgttgctctccagcggtaaaatccgcgtaattggttcgacaacctatcaggagttcagcaacattttcgagaaagaccgtgctctggcgcgtcgcttccagaaaattgatattactgaaccgtcaatcgaagaaactgttcaaatcatcaatggcctgaaaccgaagtatgaagcgcaccacgacgtgcgttataccgcaaaagcggtgcgtgctgcggtagagctggcggtgaaatacattaacgatcgtcatctgccggataaagcgattgatgttatcgacgaagcgggcgctcgcgcacgtctgatgccggtaagcaaacgcaagaaaaccgttaatgtggcggatattgaatccgtggtggcccgtattgcacgcattccagagaagagtgtttctcagagtgaccgcgataccctgaaaaacctcggcgatcgcctgaaaatgctggtcttcggtcaggataaagccattgaggcgctgactgaagccattaagatggcgcgtgcaggtttaggtcacgaacataaaccggtcggttcgttcctgtttgccggccctactggggtcgggaaaacagaggtgacggtacagctttcgaaagcgttgggcattgagcttctgcgctttgatatgtctgagtatatggaacgccataccgtcagccgtctgattggtgcgcctccgggatacgttggttttgatcagggcggtttgctgactgatgcggtcatcaagcatccacatgcggtgctgctgctggacgaaatcgagaaagcgcacccggacgtgttcaacatcctcttgcaggtgatggataacggtacgctgaccgataacaacggacgcaaagcggacttccgtaacgtggtgctggtgatgaccactaacgcgggggtacgtgaaaccgagcgcaaatccattggtcttatccaccaggataacagcaccgatgcgatggaagagatcaagaagatctttacaccggaattccgtaaccgtctcgacaacattatctggttcgatcatctgtcaaccgacgtgatccatcaggtggtggataaattcatcgtcgagttgcaggttcagttggatcagaaaggtgtttctctggaagtgagccaggaagcgcgtaactggctggccgagaaaggttacgaccgggcaatgggcgctcgtccgatggcgcgtgtcatccaggacaacctgaaaaaaccgctcgccaacgaactgctgtttggttcgctggtggacggcggtcaggtcaccgtcgcgctggataaagagaaaaatgagctgacttacggattccagagtgcacaaaagcacaaggcggaagcagcgcattaatctgattgtcaggtaggttggtcaagtccgtaatctcgaaagaggttgcggactttttatttatggggtggaacggtgaaaaccctatttttggaggtgaaggtaagttgttgataattagtgctgctggaaaaggtaaggataaaaaagggtgacagcaggaaaatgagatggttttgctttattaacaacggactaaacgtgtagtatttgagttcactgccgtacaggcagcttagaaaggaacaatcttgcaaaggctgtgaaagttggcgttcactgccgtacaggcagataaaatgcgaaaaaaactcgtactttcgtacgagctcttctttgaatatggcggtgagggggggattcgaacccccgatacgttgccgtatacacactttccaggcgtgctccttcagccactcggacacctcaccaaattgttttgctaccaaacctcatgggtggcaacggggcgctactatagggagttggagtaaaacggtcaagaagaattttaatgataattattgtttgctcatactgtaaacaagttgtgcagtatatctacatcgagacaagttatggacttatacttccaaagtacttcatacatatcacaaaataaaaaggccggttaaaccgaccttttactcgttctttctcttcgcccatcaggcggtaaaacaatcagcgactacggaagacaatgcggcctttgctcaggtcgtacggggtcagttcaacagtcactttgtcgcccgtcaggatgcggatgtagtttttgcgcattttaccggagatgtgtgcagtaaccacgtgaccgttttctaactctacgcggaacatggtattaggcaacgtttcaagaacggtaccttgcatttcaatattgtcttctttggccatctaatcctctggggtatcactaccgtaatttgaaccggcaagataatgccgaagttctgtaaataagtaaagatttgcgcgctaaatcgcaacaaacaggttcggcacattactccgaaaacacacggctaagccgcaccaaaagcgcaacgtataagggagcggtgagataaacgataggcgttacctgacgcgaaaaattccttatcggcagcggggtaatgagcgtaaccaactctgcgaccgcaattataacactctggggagaaatgtgccgaaaacattcattcttgtggtgaaaacaagcaccgtggtacccagaaattattcggcaatcgtccgaggcgcatttgattgagataatttagataatcccggcggggaatttcgcaggcaccaagcgaagctgtgtgatcgttaaggacctggcagtcgataagtttaccgccatgaccaataaattcctcacagaagaccagtagcgccgttttggacgcgttttccatccggctgaacatggactcgccacaaaatagcgttccctgggccacaccgtacataccgccaacaagctcatcttcacaccagacttcgatggagtgggcatgaccgagttcgtgaagacgatggtaggcttcgaccacgccacgcgtgatccaggttccttcttcgcgatcgctggcacagccttcaatgacctgaccaaaggcgtaattcatcgtgacacgatagggcgagcgtttatgaaatcgtttcatactacggctgatatgcagtgattctggccatagcaccgcgcggggatcgggcgaccaccagaggatggggtcgcctggagaaaaccacgggaaaataccacgctgataagccattaataggcgcgcagggctaagatcgccccccagtgccagcaggccgttaggctcacgtaatgcgccttccggggaagggaaggctattgaatggcgagaaagctgaaccaggcgcatgaccgcaaaactccacgcaagtcggatcgttcaataatagcttacaaaccctgcttaaactggtaataacgcccctgtctggcaagcagttctgcgtgagtaccttgctcaataatttgcccgttgtccatcactattatttgttggaaacgagagagtccgcgaagtcgatgggtgaccattaacaccgttttctcgcacatcatttctgcaagcaattcaaggatctgactttcggttgtggcatctaagccttctgtaggttcatccagcaataccagcggcgcatcatgtaacagcgcacgggcgatagccagacggcgcagttcaccaccggagagctggcgtccgccttcacctaaccaactgttgagacctgcatcctcgagcagcttctccagaccaacgcgacgcaagatctccgccagagcctcatcactactaccaggcgaggcgagtaacagattatcacgcagcgtggcgctaaacagatgcactcgctggggaacaacgctgatggtctgtcgtagagccgcttcattcaggctggctatgggactatcgttaagcaaaatctcgccctgttgcgggtcccatgcgcgggtcagcagttgtaacagtgttgatttgccgcatccggttcgcccgagaatcgcaatatgttccccggcgtttacctgaagataaatccctttaagtgcctgttgggattgctccggataagtgaactgaacatcccgtaatgtcagcgaaacgcgatcggcaacacgagtttgggtatcagggaaggtgacttccggtttttgatccgttaaatcagtgatccgtacggcagaggcaatgacttgccccagatgctgaaatgcacccgttactggtgccagcgcttcaaacgcggctaacgcgcagaagacaaacagggcaattaacgcgccgggttgagcattgccgccaacgccgccggacgccatccacagcatcaggatcaccgctaacgcgccaatgagcagcattatcgcttgcgacaatgcggtcagttcagattgacggcgttgcgcttccagccactgaatttcggtattctctaattgcgtgcgataacgatcgctggcaccaaaaatggtcagctcagcttgcccttgcagccaggccgtcagttgttggcgatactgcccgcgaagatgagtcagattttgcccggtgctttttcccgcacgataaaacagcggtggcatcaggaaaagcgtcagtaacataatgccgcccagcgtaaaggcgagggtgaaatcaaggaaacttaacccgattgtcaccaccataatcaccacaaaagcgcccaccagcggcgagataacgcgcaggtaaagatgatcgagcgtatcaacatccgccaccacgcggttgagtaattcgccctgacgatagcgcgccagtccggcaggggagaggggcagcaatttgctgaaggtgtatatgcgcagatgctgcaacacgcggaaagtcgcgtcgtgacttatcagacgttcaaaataacgcccggcagtacgggtgattgctgcgccacgcacgcccgcagcgggtagcatatagttgaagctgtacagtccggcaacccccgcaaccgctgaggcggagaggaaccagcccgaaagtgtcaacagaccgatactggcgagcagcgtgacaattgccagcacgataccaagacttaacatccatttatgacgtttatacagtgccagatagggtagcaaagcgcgcatttaaatctcctcctgacgatgggccagtaatgtggcgaatgggccgccagccacacttaattccgcgtaacgtccttgctcaataatctgaccatcctgcattacccaaatgacatcccagtcagcaagatcttctaactggtgggtgaccattaacgttgtctggcgcagagaggcggcattcagcgcctccattacgcgctgttcactgtgagcatcaaggctggcagcgggttcatccaacagtaatagcgaacagggatttagtaacgcacgggccaccgccacgcgctgcgcctgccccacggaaaggcgggcagcctggtcgccaacaggcgtatcaaccccttgcggcaggagcggtagaaactcactgacccaggcgttatccagcgctgtttgtaactcttgttcgctggcatcaggtcgcgccagtagtacgttatcccgtaatgttgctgccggtaattgtgggttttgcccaacccaggagagatgtttacgccatgattccggtgataaatcgcgtaattctatcccgttgattcgtagcgatccctgatatgagagaaaaccagaaagcgcgttcagcagtgaacttttacctgaaccgctgcgaccaaccaacactgctcgttggcctgctggcaaagtaaaattcagcggtccggccagcgttttaccttccggcgacgtgataaacagatcctcggcttcaatggtcaccggatcggtcgatgctaattccgcctcaccgcgctgcggatgggcgagcggggtttccataaacgttttcaaactgtcagctgcaccaacagcctgggctttagcatgataaaacgtaccgagatcgcgtaatggctggaaaaactctggcgcaaggatcagggccagaaaacccgcagccagcgtcacgccagtatcgtagtgaccaaaatccagctcgccgaggtaggaaaaaccaaagtagaccgccaccagagcaatcgacagcgaggtaaaaaattcgagaatgccggaggataaaaacgccagccgtagcacttccattgtccgttggcggaaatcttccgaagcagaacgaatactttcaatttcagcttcaccacgaccaaaaatacgcaatgtttccatgccgcgcaggcgatcgaggaaatgcccacttaagcgagcaagagcgagaaagttacgtcggttagcatcggcagcccccattccaaccagcgccataaataacggaattagcggtgcagtgcccagcagaatgagcgccgcggcccagttagaggggaagatagccaccacaatcagcagcggcaccgacactgccagcgccatttgcggcaggtagcgtgcatagtaatcatgcatatcgtcaatttgctcgagtaccagcgtcgcccagctccccgctggtttaccctgaatccacgctggccctgcttgttgcagacggtcgagaacctgacggcggatggcaaagcggatatgctgcccggcgtgataacccacccgttcgcgtaaccagaccacccatgcgcgcagtacaaaggtcagaaacagtaacgtaaagggaagcagcagggcttcacggggaatattctccataatcatatgttgcagaattcgcgccatgaaccaggcctgggcaatgatcaatatgccgctcacaaagcccagcagacgagaaatattcagccaacgttgggagatgacgctttgctgttttaaccagcgggttaattctttttgacgggatttattcattgcacgcttagcaggtgagttatcagaattatttgcagagcaatgttacaacggggaaaaaataaaggcgacccatagtcgcatggtgtcgccttctttacttttgttactgatttgtaaaattattttgcgtcagctaaaccgtcgaggtagcgttccgcatcaagagctgccatgcagcctgtaccagcagatgtaatggcctggcgataaatgtgatccatcacgtcgcctgcggcaaagacgccagggatgctggtctgggtggcattaccatgaatacccgactgtactttgatgtagccgttttccagttccagctgcccttcgaaaatggcagtattcgggctgtgaccgatagcaacaaacagaccggcaacgtcgagtgactcgatgttatcgctgttttgcgtatcgcgcagacgaacgccagtgacacccatctgatcgccggtcacttcttccagcgtacggttggtgtgcagaataatgttgccgttctccactttatccatcagacgcttaatgaggattttttccgcacggaaaccatctcggcggtgaatcagatgaacttccgaagcgatgttagacagatacagcgcctcttcaaccgcggtattgccgccgccgatgaccgcaactttctggttgcgatagaagaaaccgtcgcaggttgcacaagcagaaactccacggcctttaaaggcttcttcagagggcaggccgagatagcgtgcagaagctccggtggcaataatcagcgcgtcgcaagtgtattcgccgctatcgccagtcagacggaacggacgattctgcaaatcaactttgttgatgtgatcaaagatgatttcagtttcaaatttggtggcatgttcgtgcatgcgctccattaataacggaccggtcagatcgtttggatcgccaggccagttttccacttccgtggtggtggtcagttggccgcctttttccatgccggtaatcagcacaggttgcaggttggcgcgcgccgcgtagacagcagcggtgtatcccgctgggcctgaacccaggataagcagtttactgtgtttggtcgtgcccatgagatccccatagttgttggcagacaatggcaggattgtagggaatttacagacgtaaaaaaagagtatgacgattttgttaacaatttgtgcaatcggcagcatcgataagcaggtcaaattctcccgtcattatcacctctgctacttaaatttcccgctttataagccgattaaatgatgaataaacgcccctgttaatgaatatctggcatgttgtactaaaaatcgatgttttgctttgacaatcccctggtgttttgcgaaaacattcgaggaagaaaaaaaacagtattcttatatgcgcataaccatgcatgtaaataccatgtttaccgtgctagtgaaatctacgtatggcgtggacagacgccattcgtgatgtcgatagctgccacaaggcaacggtcttctcaccgtagacccaggcattgcgcgccgtgaatcttcatgatttcggtctatcgtgacgggtagcgactctgaacagtgatgtttcagggtcagacaggagtagggaaggaatacagagagacaataataatggtagatagcaagaagcgccctggcaaagatctcgaccgtatcgatcgtaacattcttaatgagttgcaaaaggatgggcgtatttctaacgtcgagctttctaaacgtgtgggactttccccaacgccgtgccttgagcgtgtgcgtcggctggaaagacaagggtttattcagggctatacggcgctgctgaacccccattatctggatgcatcacttctggtattcgttgagattactctgaatcgtggcgcaccggatgtgtttgaacaattcaataccgctgtacaaaaacttgaagaaattcaggagtgtcatttagtatccggtgatttcgactacctgttgaaaacacgcgtgccggatatgtctgcttaccgtaagttactgggggaaaccctgctgcgtctgcctggcgtcaatgacacacggacatacgttgttatggaagaagtcaagcagagtaatcgtctggttattaagacgcgctaacacggaacaggtgcaaaatcggcgtattttgattacactcctgttaatccatacagcaacagtactggggtaacctggtactgttgtccgttttagcatcgggcaggaaaagcctgtaacctggagagcctttcttgagccaggaatacactgaagacaaagaagtcacattgacaaagttaagtagcggccgccgtcttctggaggcgttgctgatccttattgtcctgtttgccgtctggttgatggctgccttactaagctttaacccttcggaccccagctggtcgcaaacggcctggcatgaacctatccataatttaggtgggatgcccggtgcgtggttggcagatacgctgttctttatttttggcgtgatggcttacaccattcccgtcattattgtcggcggttgttggtttgcctggcgtcatcagtccagcgacgaatacattgattattttgccgtttcgctacgcatcattggcgttttggcgctcatccttacctcctgtggtctggcggcaatcaacgctgacgatatctggtattttgcctccggtggcgtcattggcagcttactaagcactacgctacaaccactgctacacagtagcgggggaactattgcgctgctctgcgtttgggcagcgggcctgacgctgttcaccggttggtcatgggtgaccattgctgaaaaactcggcggctggattttaaatattcttaccttcgccagtaatcgtacccgtcgcgatgatacctgggtcgatgaagatgagtatgaagacgacgaagagtatgaagatgaaaatcacggcaaacagcatgaatcacgccgtgcccgtattcttcgcggcgcgctagcgcgtcgtaaacggttggcggaaaaattcattaatccgatggggcggcaaacagatgctgcgctgttctccggtaagcggatggatgatgaagaagagattacctacactgcacgcggtgtggctgctgaccctgacgacgtcctgttttcgggcaatcgtgcaacgcagccagaatatgacgaatacgatccattattaaacggtgcgccaattaccgaacctgttgctgtagcagctgctgctaccacggcgacacaaagctgggctgcaccggttgaacctgtgactcagacgccgccagttgcctctgttgatgttccacctacgcaacctacagtagcctggcagcctgtaccggggccgcaaacgggagaaccggttattgcacctgcaccggaaggttacccacaccagtcacaatatgcgcagcctgcagtgcaatataatgagccgctgcaacaacctgtacagccacagcagccgtattatgcgcctgcggctgaacaacctgtgcaacaaccttactacgctcctgcggcggaacaacctgttcagcaaccgtattacgcccctgcgccagaacaaccggtggcaggtaacgcctggcaagccgaagagcagcaatccacttttgctccacagtctacataccagacggagcaaacttatcagcagccagctgctcaggagccgttgtaccaacagccgcaacccgttgaacagcagcctgttgtggagcctgaacccgttgtagaagagacaaaacccacgcgtccgccgctttactattttgaagaagtggaagagaagcgagcccgtgaacgtgaacaacttgcggcctggtatcaaccgattccagaaccggttaaagaaccggaaccgatcaaatcttcgctgaaagcaccttctgttgcagcagtacctccagtagaagccgctgccgctgtttctccgctggcatctggtgtgaaaaaagcgacactggcgacgggggctgccgcaaccgttgccgcgccagtcttcagtctggcaaatagcggtggaccgcgtccgcaggtcaaagaggggattggcccgcagttgccacgaccgaaacgcatccgcgtgccaactcgtcgtgaactggcgtcttacggtattaagctgccctcacagcgtgcggcagaagaaaaagcccgcgaagcccagcgtaatcagtacgattctggcgatcagtacaacgatgatgaaatcgatgcgatgcagcaggatgaactggcacgtcagttcgcccagacgcagcagcaacgctatggcgaacagtatcaacatgatgtgcccgtgaacacagaagatgcagatgctgcggcagaggcagaactggctcgtcagtttgctcaaactcaacaacaacgttattccggcgaacaaccggctggggcgaatccgttctcgctggatgattttgaattttcgccaatgaaagcgttgctggatgatggtccacacgaaccgctgtttacgccaattgttgaacctgtacagcagccgcaacaaccggtagcaccgcagcagcaatatcagcagccgcaacaaccggtagcaccgcagccgcagtatcagcagccgcaacaaccggttgcaccgcagccgcagtatcagcagccgcaatatcaacagccgcaacaaccggttgcaccgcagcagcaatatcagcagccacaacagccggttacacagcagccgcagtatcagcagccgcaacagccggttgtaccacagccgcaggataccctgcttcatccgctgttgatgcgtaatggcgacagccgtccgttgcataaaccgacgacgccactgccttctctggatttgctgacaccgccgccgagcgaagtggagccggtagatacctttgcgcttgaacaaatggcgcgcctggtagaagcgcgtctggctgatttccgtattaaagccgatgttgtcaattactctccggggccagttatcactcgctttgaattgaacctggcaccgggcgtaaaagcagcgcgcatttctaacttgtcacgtgaccttgcccgttcactttcgacggtggcggtgcgtgtcgttgaagttattcctggcaaaccctatgtaggtctggagttaccgaataaaaaacgacaaaccgtttatctgcgcgaagttttggataacgccaaattccgcgataatccgtcgccattaaccgtggtgctgggtaaagatatcgccggtgagccggtggttgccgatctggcgaaaatgccgcacttgttggttgcggggactaccggttccggtaagtctgtcggggtgaatgcgatgatcctgagcatgctttataaagcacagccagaagatgtacgtttcatcatgatcgacccgaaaatgctggagctttcggtttatgaaggcattccgcacctgttaacggaagttgttactgatatgaaagatgccgccaacgcgctgcgctggtgtgttaacgagatggagcgtcgttataaactgatgtctgcgctgggtgtgcgtaatctggcgggttataacgaaaaaattgctgaagccgatcgcatgatgcgtccgattccagacccgtactggaagccgggtgatagtatggatgcgcagcatccggtgctgaaaaaagaaccatacattgtggtgttggtggacgaatttgccgacctgatgatgacggtaggtaaaaaagtggaagagctgatagcacgtctggcgcaaaaagcccgtgccgcgggtatccacctcgtactggcaacgcagcgtccatcggttgatgttattactggtctgattaaagcgaatattccgacccgtatcgcctttaccgtatccagtaagattgactcacgtaccattcttgatcaggctggtgcggaatcactgctgggtatgggggatatgctctactctgggccgaactccacgttgccggtacgtgtccatggtgcttttgttcgcgatcaggaagttcatgccgtggtgcaggactggaaagcgcgtggtcgcccacagtatgttgatggcatcacctccgacagtgaaagcgaaggtggcgtgggcggtttcgatggcgctgaagaactggatccgttgttcgatcaggcggtgcagtttgtcactgaaaaacgcaaagcgtcaatttctggcgtacagcgtcagttccgcattggttataaccgtgcagcgcgtattatcgaacagatggaagcgcaggggattgtcagcgaacaggggcacaacggtaatcgtgaagtgctggccccaccgccatttgactaattaatgcaacgtagaccggataagacgcgatagcgtcgcatccggtattctatcaactgaaaattcagtattttcttctttcctcaagctgattattagcctggaatagagagtagagggaactcccgattgggagtgacgtaatttgaggaataatgatgaaaaaaattgccatcacctgtgcattactctcaagcttagtagcaagcagcgtttgggctgatgccgcaagcgatcttaaaagccgcctggataaagtcagcagcttccacgccagcttcacacagaaagtgactgacggtagcggcgcggcggtgcaggaaggtcagggcgatctgtgggtgaaacgtccaaacttattcaactggcatatgactcaacctgatgaaagcattctggtttctgacggtaaaacactgtggttctataacccgttcgttgagcaagctacggcaacctggctgaaagatgccaccggtaatacgccgtttatgctgattgcccgcaaccagtccagcgactggcagcagtacaatatcaaacagaatggcgatgactttgttctgacgccgaaagccagcaatggcaatctgaagcagttcaccattaacgtgggacgtgatggcacaatccatcagtttagcgcggtggagcaggacgatcagcgcagcagttatcagctgaaatcccagcaaaatggggctgtggatgcagcgaaatttaccttcaccccgccgcaaggcgtcacggtagatgatcaacgtaagtagaggcacctgagtgagcaatctgtcgctcgatttttcggataatacttttcaacctctggccgcgcgtatgcggccagaaaatttagcacagtatatcggccagcaacatttgctggctgcggggaagccgttgccgcgcgctatcgaagccgggcatctgcattctatgatcctctgggggccgccgggtaccggcaaaacaaccctcgctgaagtgattgcccgctatgcgaacgctgatgtggaacgtatttctgccgtcacctctggtgtgaaagagattcgcgaggcgatcgagcgcgctcggcaaaaccgcaatgcaggtcgccgcactattctttttgttgacgaagttcaccgtttcaacaaaagccagcaggatgcatttctgccacatattgaagacggcaccatcacttttattggcgcaaccactgaaaacccgtcgtttgagcttaattcggcactgctttcccgtgcccgtgtctatctgttgaaatccctgagtacagaggatattgagcaagtactaactcaggcgatggaagacaaaacccgtggctatggtggtcaggatattgttctgccagatgaaacacgacgcgccattgctgaactggtgaatggcgacgcgcgccgggcgttaaatacgctggaaatgatggcggatatggccgaagtcgatgatagcggtaagcgggtcctgaagcctgaattactgaccgaaatcgccggtgaacgtagcgcccgctttgataacaaaggcgatcgcttttacgatctgatttccgcactgcataagtcggtacgtggtagcgcacccgatgcggcgctctactggtatgcgcgaattattaccgccggtggcgatccgttatatgtcgcgcgtcgttgcctggcaattgcttccgaagatgtcggcaatgccgacccacgggcgatgcaggtggcaattgcggcctgggattgctttactcgcgttggcccggcggaaggtgaacgcgccattgctcaggcgattgtttacctggcctgtgcgccaaaaagcaacgctgtctacactgcgtttaaagccgcgctggccgatgctcgcgaacgtccggattatgacgtgccggttcatttgcgtaatgcgccgacgaaattaatgaaggaaatgggctacgggcaggaatatcgttacgctcatgatgaagcaaacgcttatgctgccggtgaggtttacttcccgccggaaatagcacaaacacgctattatttcccgacaaacaggggccttgaaggcaagattggcgaaaagctcgcctggctggctgaacaggatcaaaatagccccataaaacgctaccgttaatgttatcgttgcggtaatgttgttaatgtatccctgtggtcgcaggctgtggccacatctcccatttaattcgataagcacaggataagcatgctcgatcccaatctgctgcgtaatgagccagacgcagtcgctgaaaaactggcacgccggggctttaagctggatgtagataagctgggcgctcttgaggagcgtcgtaaagtattgcaggtcaaaacggaaaacctgcaagcggagcgtaactcccgatcgaaatccattggccaggcgaaagcgcgcggggaagatatcgagcctttacgtctggaagtgaacaaactgggcgaagagctggatgcagcaaaagccgagctggatgctttacaggctgaaattcgcgatatcgcgctaaccatccctaacctgcctgcagatgaagtgccggtaggtaaagacgaaaatgacaacgttgaagtcagtcgctggggcaccccgcgtgagtttgactttgaagttcgtgaccatgtgacgctgggtgaaatgcactctggcctcgactttgcagccgcagttaagttgactggttcccgctttgtggtaatgaaagggcagattgctcgcatgcaccgcgcactgtcgcagtttatgctggatctgcataccgaacagcatggctacagtgagaactatgttccgtacctggttaaccaggacacgctgtacggtacgggtcagctgccgaaatttgctggcgatctgttccatactcgtccgctggaagaagaagcagacaccagtaactatgcgctgatcccaacggcagaagttccgctgaccaacctggtacgcggtgaaatcatcgatgaagatgatctgccaattaagatgaccgcccacaccccatgtttccgttctgaagctggttcatatggtcgtgacactcgtggtctgatccgtatgcaccagttcgacaaagttgaaatggtgcagatcgtgcgcccggaagactcaatggcggcgctggaagagatgaccggtcatgcggaaaaagtcctgcagctgctgggcctgccgtaccgtaaaatcatcctttgtaccggcgacatgggctttggcgcttgcaaaacttacgacctggaagtatggatcccggcacagaacacctaccgcgagatctcttcctgctccaacgtttgggatttccaggcacgtcgtatgcaggcacgttgccgtagcaagtcggacaagaaaacccgtctggttcataccctgaacggttctggtcttgctgttggtcgtacgctggttgcagtaatggaaaactatcagcaggctgatggtcgtattgaagtaccagaagttctgcgtccgtatatgaacggactggaatatattggctaatacccaatttttctgaatctaaaaagcgcctgcgggcgctttttttgtctccctttgataccgaacaataattactcctcacttacaagtaatactactttcgagtgaaaatctacctatctctttgattttcaaattattcgatgtatacaagcctatatagcgatctgctatagaaataattacacaatacggtttgttactggaatcaatcgtgagcaagcttgagtgagccattatgaaaacgaaaatccctgatgcggtattggctgctgaggtgagtcgccgtggtttggtaaaaacgacagcgatcggcggcctggcaatggccagcagcgcattaacattaccttttagtcggattgcgcacgctgtcgatagcgctattccaacaaaatcagacgaaaaggttatctggagcgcctgtacagttaactgtggtagtcgctgcccgctacgtatgcacgtagtggacggtgaaatcaaatatgtcgaaacggacaataccggcgatgacaattacgacggcctgcaccaggttcgcgcctgtctgcgtgggcgttccatgcgtcgccgtgtctacaatccggaccgcctgaaatatccgatgaaacgagtcggggcgcgcggtgaaggcaaattcgagcgcattagctgggaagaagcctacgacatcatcgcgaccaaaatgcagcgcctgatcaaagagtacggcaacgagtctatctatctgaactatggcaccggtacgctgggcggcaccatgacccgctcgtggccgccgggaaataccctggtcgcgcggctaatgaactgctgcggcggttatctgaaccattatggcgactactcctccgcgcaaattgcggaaggtctgaactatacctacggcggctgggcagatggtaacagcccgtcggatatcgaaaacagtaaactggtagtgctgtttggtaataaccctggcgaaacgcgaatgagtggcggtggggtgacttactatcttgaacaggcgcgccagaaatctaatgctcgcatgatcatcatcgatccgcgctataccgacaccggtgccgggcgtgaagatgagtggatccctattcgtccgggaacagatgccgcactggttaacggtctggcgtatgtcatgatcaccgaaaacctggtagatcaggaattcctcgataaatattgcgttggctacgacgagaaaaccctgccagccagtgcgccgaaaaatggtcactataaagcttatattctgggtgaaggacccgatggcgtggctaaaacaccggaatgggcctcgcaaatcaccggtgttccggcagacaaaatcatcaaactggctcgtgaaatcggcagtaccaaaccggcgtttatcagccagggatggggcccgcagcgtcatgctaacggtgaaatcgcaacccgtgctatctcgatgctggcgattctgaccggtaacgttggtattaacggggggaacagcggcgcgcgcgaaggttcatacagcttaccgtttgtccgtatgccgactctcgaaaacccgatccagaccagcatttctatgtttatgtggaccgatgccattgaacgtggcccggaaatgacggcgctgcgtgatggtgtgcgcgggaaagataagctggatgtgccgatcaaaatgatctggaactatgccggtaactgcctgattaatcagcattctgaaatcaaccgtacccatgaaatccttcaggatgataagaagtgcgagctgattgtggttatcgactgccacatgacctcatcggcgaaatatgctgacatcttgctgcctgactgcaccgcttccgaacagatggactttgcactggatgcatcctgcgggaatatgtcttacgttattttcaatgatcaggtcattaaaccgcgctttgaatgtaagactatctatgagatgaccagcgaactggcaaaacgtcttggcgtcgaacaacagtttactgaaggtcgtactcaggaagagtggatgcggcatctgtatgcccagtcgcgggaagcgattcctgaactgccaacgtttgaagagttccgtaagcaggggatctttaaaaagcgcgatccgcaagggcatcacgttgcttacaaagccttccgtgaagatccgcaggctaatccattgaccacgccatcgggcaaaattgagatctattcacaggcgctggctgacattgccgctacctgggaattgccagaaggtgatgtgatcgatccactgccgatctatacgccgggctttgaaagttatcaggatccgctgaacaaacagtatccgctgcagcttacgggtttccactataaatctcgcgttcactcaacttacggcaacgttgatgtgctgaaagcagcttgccgtcaggaaatgtggatcaacccgcttgatgcgcaaaaacgcggtatcagcaacggcgataaagtcaggatctttaatgatcgtggtgaggttcatattgaggcgaaagtgacgccacgaatgatgccgggtgtggtcgcactgggtgaaggtgcctggtatgacccggatacaaaacgtgtcgataagggcggttgtattaacgtactgaccactcaacgtccgtctcctcttgccaaggggaatccatcacatacgaaccttgttcaggttgaaaaggtgtaaggagtaaccgatgacaacccagtatggattttttattgattccagccgttgcaccggttgcaaaacctgcgagctggcttgtaaagactacaaagatttgacgccagaagtcagcttccgccgcatttatgaatatgctggtggcgactggcaggaagataacggtgtctggcaccagaacgtgtttgcctactatctgtcgatttcatgtaaccactgcgaagatccggcttgtaccaaagtctgcccaagcggtgcgatgcataaacgtgaagatggttttgtcgttgtcgatgaagatgtgtgtattggctgtcgttactgccatatggcctgcccgtatggcgcaccgcagtacaacgcaaccaaaggtcatatgaccaaatgtgatggttgctatgaccgcgtcgcagaaggtaaaaaaccgatctgcgtcgaatcttgcccgctacgggcgctggatttcggacctatcgacgagctgcgtaaaaaacacggcgatctggcggctgttgcgccgttgccgcgtgcgcacttcaccaaaccgaatattgtgatcaaacctaacgccaatagccgcccaaccggggataccactggctatctggcaaacccgaaggaggtgtgagatgggaagtggatggcatgaatggccgctgatgatcttcacggttttcgggcaatgtgtagcgggtggttttatcgttctggctttggcgctgctcaaaggcgacctgcgagcagaagcccagcagcgtgttatcgcctgcatgttgggtttatgggtgctgatgggcattggctttatcgcctctatgcttcatcttggttcaccgatgcgcgcttttaactcgctcaatcgggtaggggcttcagcactcagtaacgaaatcgccagcggttcgatcttttttgctgtaggcggcatcggctggttgctggcaatgctgaaaaagctttcaccggcattgcgtacgctttggctggtggtgacgatggttcttggcgtagtctttgtctggatgatggtgcgtgtgtataacagcatcgatacagtacccacctggtacagcatctggacactgatgggcttcttcctgacgatgtttatgggcggcccgttactgggttacctgttgctgagtctggctggtgtcgatggctgggcgatgcgtctgctgccagccatttctgttctggcactggtagtgagtggcgtgatgtcagtgatgcagggcgcagagctggcgactattcatagctctgtgcagcaggccgcagcgctggtgccggactatggtgcgctgatgtcctggcggattgtgcttttggccgttgccctgtgcttgtggattgcaccacagctaaaaggttatcagcctgcggttccgctactttctgtatcattcattctgcttctggcaggggaattaatcggtcgtggcgtattctatggtttgcatatgaccgtggggatggctgtcgcaagttaatcagtaacaaccggggtttcggccccggttcgcttttatttctgcttcgttaacgtgtcataactggtcatcaagttacgataatcaggaatgtggttagagaacaacgtcgccagtccttcaatatcattacgccagtcgcgatgcagctcgcacgccacgccgaaccatgtcatcaattgcgcaccagcttgcgacatgcgatcccatgccgaatgccgggtaatttcattaaaggtccctgacgcatcagtcacgacaaagacgtcaaacccttcttcaatggctgaaagcgccgggaatgccacgcaaacttcggttaccacaccggcaataattaactgttttttacctgtcgctttgacagcttttacaaaatcttcgttatcccaggcgttaatatttcccgggcgagcaatgtaaggtgcatcggggaattgtgctttcagttctggaactaatgggccgttaggaccggtttcaaaactggtggtaagaatagttggtaagttgaaatacttagccaggtcacccagcgccagcacgttatttttaaacttatcgggttcgatatcccgtacaagggaaagtaaaccagcctggtgatcaacaagcaaaacggcagcatcatttttatcaagacgaacatacggtttggtcatcctcttctcctttcgagagtcagtggtacgtctaaatcggtcagacgtgatgcattgctctgaaagcatagacgggaaatatgagtttgctgtgaccatgaaatttttcgactgaacgaagcgtatgaaatttgtgttagatcaataaaaacaatcagatgagattaatcgtctcttcagcattagcgttatgaatgagtaatataaatcgataataccgccgctgcgatatgcgcgtattttcacccattgacaatgtttttggcggtggcatgatgcgcatgaaatttgaacttcctcacggttttaattcatgtccacgtatacccggcctgtcatgcttttgctgtctggcctgcttttgttgactctggcgattgcggtgttaaatacactcgtgccgctttggctcgcccaggaacacatgtctacatggcaggtaggcgttgtcagctcatcctattttaccggcaaccttgtcggtacattgctgacagggtatgtcattaaacgcattggctttaaccgtagctattatctggcctccttcatttttgccgctggctgtgccggccttggcctgatgattggattctggagttggttggcgtggcgttttgtcgcgggcatcggctgtgccatgatttgggtggttgttgagagtgcgctgatgtgcagtgggacgtcgcgtaaccgcgggcggttgcttgctgcgtatatgatggtttattacgtcggaacgtttttaggccagttactggtcagcaaagtctcaaccgagttgatgagtgtattgccgtgggttacaggtttgacgttggcaggaatcttaccgctgttgtttacgcatgtcctgaatcagcaggctgaaaaccatgattcgacgtcaattacgtcaatgctaaaactccgtcaggcgcggcttggcgtgaatggctgcattatctcaggaatcgtgctgggatctctatatggcctgatgccgctgtacctcaatcacaaaggggtgagcaatgccagcattggtttctggatggcggtactggtcagtgcgggtatcctcgggcaatggccgattggacgtctggcggataagtttggtcgactgctggtgttgcgtgttcaggtctttgtcgtcattctcggcagtattgcgatgcttagccaggcggcgatggccccagcgttattcatcctcggtgccgctggctttacgctatatccggtggcgatggcctgggcttgtgagaaagttgaacatcatcaactggtagcgatgaaccaggccttactgttgagctataccgtgggaagcctgcttggcccgtcatttaccgctatgctaatgcagaatttctccgataatttattatttatcatgatcgccagcgtatcgtttatctatttgctgatgctgcttcgtaacgccggtcatacgccgaaacccgtggctcacgtgtaaatgaattcaagcagagtgtgaacttactgtttcacactctgcttttctgtgcacaaaaaagcggcaacttaataaagttgccgctttacggggaaattagaacatgaccttatgaccgtactgctcaagaatgcctttcacgcgttccatggtctctttcttcggtggtttaacaccatcgagtttgtattcttcacccattgccacccatttgtgtttgcccagttcgtggtaggggaggagctcgattttctcaacgttgcccatatcacgggtaaattcaccaaggcgatgcgctgaatcgtcatcgtcagaccagcctgggacaacaacatagcggatccacaccttcacatttttgttcgccagatatttagcgaactccagcgtgcggtggttggaaactccaaccagattttggtggatctcgtcgttcatctgtttgagatcgagcattaccaggtcggttacttccagcagttcatcaatcaccggatcgtaacgacgaacaaaaccgttggtgtccagacaggtatgaatgccttcttttttgcaggcgcggaaccagtcacgaacaaactcagcttgtaggattgcctcaccgccggatgcggtaacgccgccgccggaagcgttcataaagtggcgataggtcaccacttccttcatcaaatcttcaacggtaacttctttaccgccatgcgtatcccaggtgtcgcggttatgacaatacaggcagcgcatcaggcagccctggaaaaaggtgataaagcgaatacccgggccgtctacggttccacaggattcaaaggagtgaatgcgaccaataactgacattgcggtgtttctccagatgtggcccatctgaggccgtgttggtgcgcagctcgaaggctacgtcgagtctgttttggcagtcaccttaaagtatagatagctgacaaaaaaggctctcgtgctaaaaaaggccccactttcgtggagcctttattgtacgctttttactgtacgatttcagtcaaatctaattacatagattgagtgaaggtacgagtaataacgtcctgctgctgttctttagtcagcgagttgaaacgtactgcgtagccagatacacggatggtcagctgcggatatttttccgggttttccatcgcgtcgagcagcatttcacggttcatcacgttaacgttcaggtgctgaccaccttcgatggatgcttcgtggtggaagtaaccatccatcagaccagccaggttggtcttacgaacttcgtcgtctttacccagtgcgttcggaacgatagagaaggtgtaggagataccatctttagcgtaagcaaacggcagtttagcaacggaagtcagagacgctacagcacctttctggtcacgaccgtgcatcgggttagcacccggtccgaacggcgcgccagcacgacgaccgtctggggtgttaccagttttcttaccatacacaacgttagaagtgatggtcagaacagactgagtcgggatagcgtcacggtaggtgtgcagtttctgaattttcttcatgaaacgttctaccaggtcaacagccaggtcatctacacgcggatcgttgttaccaaactgcgggtattcgccttcgatttcgaagtcgatagccagaccgtcttcgtcacgaatcggtttaactttcgcatatttgattgcagacagggagtcagcagcaacggacagaccagcgataccacacgccatggtgcggataacgtcacggtcgtgcagcgccatcagagaggcttcgtagctgtacttgtcgtgcatgtagtggatgatgttcagtgcagtgatgtactgtttagccagccagtccatgaagtgatccatgcgctccatcacttcatcatagttcaggacatcgcctttgatcggttcagacttcggaccaacctgcattttcagtttttcgtcaacgccgccgttgattgcgtacagcatggttttcgccaggtttgcacgcgcaccgaagaactgcatttgtttaccaacgatcatcgggcttacgcagcaagcaatagcgtagtcatcgttgttgaagtccggacgcatcaggtcatcgttctcatactgcagagaagaggtgtcgatggacactttagcggcgaatttcttgaagttcagcggcagtttttcagaccacagaatggtcatgttcggttccggagacggacccatggtgtacagggtgttcaggaaacggaagctgtttttggtaaccagggtacgaccgtcgaggcccataccaccgatagattcggttgcccagatcgggtcgccagagaacagttcatcgtattccggagtacgcaggaagcgaaccatacgcagtttcatgaccaggtggtcaaccatttcctgcgcttcttgttcggtgatcttgccagctttcaggtcacgttcgatgtacacatccaggaaggtggaggtacgaccgaaggacattgcagcaccgttctgagacttaacagcagccaggtagccgaagtaagtccactggatagcttcctgagcgttggtagccggaccagagatgtcgtagccgtatttcgcagccatttctttcatctgacccagagcgcggtgctgttcagcgatttcttcgcgcagacggatagtctgttccaggtttacgccgttttccagatcagcctgcagagaggtgaactgtgcaagtttgtctttcatcaggtagtcgataccgtacagcgcaacgcgacggtagtcaccgatgatacgaccacggccataagcatctggcagaccggtcagaacaccggatttacggcaacgcaggatgtccggagtgtaaacgtcgaacacgccctggttgtgagttttacggtattcagtgaagatttttttgatcatcgggtccagttcgcggttgtacgctttgcaggaaccttcgatcattttgataccaccgaacgggataagagcacgtttcagcggagcttcagtctgcagaccaacgattttctcaagctgcttgttgatgtaaccagcgtcgtgagaggtgatggtggaagcaacagcggtgtcaaagtcaactggcgcgtgagtgcggttttccagtttaacgccttccattactttgtcccacagggtggtggtcgcttcagtagcgccagccaggaaggactcgtcaccctcgtacggagtgtagtttttctgaatgaagtcacggacgtttacttcattctgccagtcacctttggtaaaaccttcccaggctgtggctaacttttcattaagctcggacatgtaacacctaccttcttaagtggattttttatttactgcgtacttcgacaaccattaatggtgatcgttttcacgcaggtaaatgacccagtatgtcaacccaaccaacaaaccaccgccgataatattaccgatcgtaaccggaatcaggttatcagtgatgaaattcatcacggtcaggtgagaaaaattttccggtgcagaaccgacagcggtccagaattccggagatgcgaagtcgcggattacaatacccatcgggatcataaacatgtttgcgatactgtgctcaaaaccgctggcaacaaacatcgcgaccggcagcaccataatgaacgctttgtccatcaggctgcggccagaataactcatccatactgccagacataccatcaggtttgccaggataccaagacagacggcctcaataaaagtatggtgcactttgtggtcggcggtttgtaggacgtttagtccccattgaccatttgcggtcatatactcgccggaaagccacattaaaagtacaaacagcagtgcgccgaccaggttgccaaaataaacatttagccagtttttcgccaactgaccccaggtgatgcgcccactcgccttggcaacaacaatcaacactgtggaagtaaagagatcggctccgcagacaacacaaagaatcaaccccagagagaagcaaatgccgccaaccagttttgccatgccgaagggcattgtacctgtgccagtggttgctgtgatatagaagacgaatgcgattgagatgaaaacaccggcggtaatcgccagatagaaagtcttaagcggatgtttcgttgctttatagacacctgcctcttcggccactttggccattgcagcaggaagtaaaagatcaaaagggttgtcagctttcacactaactctctctttattaagtcggcgacgagatactaacaaagcattatagatgagaaattgatatagatcatatctcgcctggcttataggcccgtaactcgcatggtttttatgcaaatacggagtaaatatttgattatccaaataaaaataaattttaaaaattaacaaatgagttgaattttttccgcatcctccgctaaaacagttaattaaaagggagcacctggcgaataaagtaacaatatcgatcgtatttattaaatacaaattaccgatatttaaccttataattacaattattttattaatgcaaatatatgtgaagcggggcattaaaaaaacgccccgtaatataactcagacgaatcattaagcctacattgcgtaggctatttgattttattttgcccagaatgctgctttggcgcgttgcagcttttcgtaggccttcaacaacgactgatgtgcagcaaacgcgtgcagatcgctatctactggttgcaagccataaaacgccgcttcgccgctcattgccgcactggcggcttccacggcatctgcgccgtacatgcgaacaaacgcattcagatattgcagcggctggcgatcttcttcctgcgccagtaataacaacgtttgcaggcagcgataataattggcgcgttccgggctgaatactgatgagttaaactccatcgtccattcggtccagaccagagcctgttccagatcgccaccagccagcgccagcatggcttttaattcaccgatacgcagagtgtaccagccgttatccgacccggtcgccagacccaacagttcacgcacgcgggtaaagtcatcaaaaccttcttcatccagttgctcgatgaggttcaggtaatcttccttttcccactcgctacctggtagcgaaagaatcgtttcacgtaaatggctgcccatactgttattcgccagccacagatcttcagccggataaatatcggacatgccaggcacgataatacggcaagcgtagacacccagatgctcgtaatcggcaatataaacttctttatcttcctttttgaagatagccatcagcgtggcgaactcttcttccgtggtgccggagaagctccagtcaacaaacggataatcggcatcctgcttgaacaggtcccaggagattaaaccgctggaatcgataaagtgcgtttcgaggttggtatgttcagcgacttcttcatcatcgaaggttggtggagtaaacacatccagatctttcaggccacgaccttgcagcagctcggtcacggtacgttccagtgcaacgccaaaatcaggatgcgcaccgaatgaggcaaagcaggtaccgttagcaggattgaacagtaccacgcaaatcaccggatactggccgccaagcgaaccgtcataagcgaagatcgggaaaccttccgcttccagcgtttcgatcgcttcaactactgctggataacgtgccagcacgtctgccgggatttccggcaagctgatgctttcagcaataatgcggtttttcacgtaacgttcgaaaacttcggacaacccctgaacgcgtgcttcgttacgggtattgccagcagacataccgttagaaacgtacaagttaccaatgatattcatcggaatataaatggtctgattgtcggactggcgcgtaaacggtagaccgcaaataccacgatcttcgttaccggattgcaggtcaatcagcatactaccggtcagttcattctccggatcgtaaaatgcgcgcagacggtcatcgagcagcccttctggtacatcgtcattttcggtcagtgggaaccatttttcgttgggataatgcacgaatgggccgttggcgatggtttcgcccagccagaagtccgcaaaaaagtagttggttgagagacgctcgaaatattcaccgagggcagaagccagcgccgcttttttggttgcgcctttaccgttggtaaaacacagtgcgcactctttgtcgcgaatatgtacagaccagacgttaggcaccggattcagccaggaggcctcttcaatctgaaaaccgaggtctgaaagtttttgctggaagcgtgcgatggaatcttccagagcggcatctttgccggggataaatgtttgcgtcatgaaaatcactttagtcgtacggaaagcgcacaataatacgggttttatctcaaaggcgctattaccgccgccatgccgatgaactgttggctatgcttttagcggataaaccacgataagagcataaaaatgaaggcgttcgatctccaccgtatggcatttgataaagtgccttttgatttccttggcgaagttgcactacgtagtctttatacctttgtactggtttttttgttcctcaaaatgaccggaagacgcggtgtgcggcagatgtcgctgtttgaagtgttaatcattctgacactgggttcagcggcgggagatgtggcgttttatgatgatgtgccgatggtcccggtacttatcgtctttattactctggcgttgttataccgcctggtaatgtggttgatggcgcacagtgaaaaactggaagatcttctggaaggcaagccggttgtcattattgaagatggcgagctggcctggtcgaaactcaataactccaacatgacggaatttgagttctttatggagctacgattgcgcggtgtagagcagttggggcaggtacgtctggcgattctcgaaaccaacgggcaaatcagtgtttatttctttgaagatgacaaggtgaaaccggggttacttattttacccagtgactgtactcagcgttacaaagtggtgccggagtcggcggactatgcctgcatccgttgcagtgaaatcattcatatgaacgcgggggaaaaacaattatgtccgcgctgtgcaaatccagaatggacgaaggcaagtcgggctaaacgggtgacctgacagccaaaacatcggttttttgaaaataatccgagagattcttttgtgtgacgcgtgcctcatttttgccctcaacggttttactcattgcgatgcgtgtcactgaatgataaaaccgatagccacaggaataatgtattgcctgtggtcgcaattgattgaccgcgggttaatggcaacgcaacgtggtgaggggaaatggctcaaatcttcaattttagttctggtccggcaatgctaccggcagaggtgcttaaacaggctcaacaggaactgcgcgactggaacggtcttggtacgtcggtgatggaagtgagtcaccgtggcaaagagttcattcaggttgcagaggaagccgagaaggattttcgcgatcttcttaacgtcccctccaactacaaggtattgttctgccatggcggtggtcgcggtcaatttgctgctgtaccgctgaatattcttggtgataaaaccactgcagattatgttgatgcgggttactgggcagcaagtgctatcaaagaagcgaaaaaatactgcacaccaaatgtgtttgatgcgaaagtgaccgttgatggtcttcgcgcagttaagccaatgagtgaatggcaactctctgataatgctgcttatatgcattactgcccgaacgaaaccattgacggtatcgctatcgatgaaacaccagacttcggtaaagacgtggtggtcgccgctgacttctcttcaaccattctttcccgtccgattgatgtcagccgttatggtgtaatttacgctggcgcgcagaaaaatatcggcccggctggcctgacaatcgtcatcgttcgtgaagatttgctgggcaaagcgaatatcgcctgcccatcgattctggattactccatcctcaacgataacgattccatgttcaacacgccgccgacatttgcctggtacttatctggcctggtcttcaaatggctgaaagcgaacggcggtgtggctgcaatggataagatcaatcagcaaaaagcagaactgctgtatggggtgattgataacagcgatttctaccgcaatgatgtggcgaaagctaaccgttcgcggatgaacgtgccgttccagttggcggatagcgcgcttgataaattgttcctcgaagagtctttcgctgcgggcttacatgcgctgaaaggtcaccgagtggtcggcggaatgcgtgcgtctatttataacgccatgccgctggaaggtgttaaagcactgacagacttcatggttgagttcgaacgtcgtcacggctaatgtcgaaattttgcataatccccacagccagcctgtggggtttttatttctgttgtagagagttgagttcatggaatccctaacgttacaacccatcgctcgtgtcgatggcactattaatctgcccggttccaagagcgtttctaaccgcgctttattgctggcggcattagcacacggcaaaacagtattaaccaatctgctggatagcgatgacgtgcgccatatgctgaatgcattaacagcgttaggggtaagctatacgctttcagccgatcgtacgcgttgcgaaattatcggtaacggtggtccattacacgcagaaagtgcccgggagttgttcctcggtaacgccggaacggcaatgcgtccgctggcggcagcactttgcctgggtagcaatgatattgtactgaccggtgaaccgcgaatgaaagaacgcccgattggtcatctggtggatgcgctgcgccagggcggggcgaagatcacttacctggaacaagaaaattatccgccattgcgtttacagggcggctttactggcggcaacgttgatgttgatggctccgtttccagccagttcctcaccgcactgttaatgactgcgcctcttgcgccggaagatacggtgattcgtattaaaggcgatctggtttctaaaccttatatcgatatcaccctcaatctgatgaagacgtttggtgttgaaattgaaaatcagcactatcaacaatttgtcgtaaaaggggggcagtcttaccagtctccgggcacttatttggttgaaggcgatgcatcttcggcttcttatttcctggcagcagcagcaatcagaggcggcactgtaaaagtgaccggcattggacgcaacagtatgcagggtgatattcgctttgctgatgttctggaaaaaatgggcgcgaccatttgctggggcgatgattatatttcctgcacgcgtggtgaactgaacgccattgatatggatatgaaccatattcccgatgcggcgatgaccattgccaccgcggcgttatttgcaaaaggcaccaccacgctgcgcaatatctataactggcgtgttaaagagtccgatcgcctgtttgcgatggcaacagaactgcgtaaagtcggtgcggaagtcgaagaggggcatgatttcattcgcattacgccaccggaaaaactgaaatttgctgagatcgccacttataatgatcaccggatggcgatgtgtttctcgctggtcgcattatcagatacgcctgtgacgattcttgatccaaaatgtaccgctaaaacttttccagactatttcgagcaattggcgcggataagtcaacccggctgaatgaataacgggcgataacatagacaatcctttcttttcaaagacgtcggcacattgccggcgttttttttcggaccttgtggggtatttttattaatggtagcgttaattatcaatgtaacttgttgatacataatgtttatatataattaatcaacggatgattcacatgaagaatactaaattattgctggcgattgcgacctctgcagccttactgacaggatgtcagaatacgcacggtattaataccgatttggctatcagctcaggtctgaatgcttataaagccgcaacattaagcgatgctgatgctaaagcaatcgccaatcagggctgtgtcgaaatggacagcggcaataaagtggcaagcaaatccagcaagtacgggaaacgtctggcaaaaatcgccaaagcattgggtaacaatattaatggcacgccagtcaactataaggtttatatgaccagcgacgtcaacgcatgggcgatggcgaacggttgtgttcgtgtctacagtggcctgatggacatgatgaacgacaacgaaattgaaggcgttctgggccatgaactgggccacgtcgcgttgggtcactcgctggctgaaatgaaagcttcttatgcgatcgtggccgcacgcgatgccatttcagctaccagcggtgtggcttcccagctttcccgttcacaattaggtgatatcgcagaaggcgctatcaatgctaaatactcccgtgataaagaatccgaagcagatgatttctcttttgatctgttgaagaaacgtggcatcagtacccaggggctggttggtagctttgaaaaactggccagcctggatggcggtcgcacccagtccatgtttgattctcacccaccatcaacagagcgtgcgcaacacatccgtgatcgtatcgcctctggtaagtaaatcattgtcatctttcgggctggtcttctgccagcccgctataattgcgcaataaatccccatctgaatacagacaaaactggtttttgcacacaacgttaacgatttgtggcgtcggcgcgtataatgcgcgcggttatgttaacggtacgcctgttttaaggagataaagatgacggcaattgccccggttattaccattgatggcccaagcggtgcagggaaaggcaccttgtgtaaggctatggcggaagcgttgcaatggcatctgctggattcgggtgcaatttatcgcgtactggcactagcggcattacatcaccatgttgatgttgcatcggaagatgcgctggtgccgctggcatcccatctggatgtacgttttgtgtcaaccaacggtaatctggaagtgatcctcgaaggggaagatgtcagcggcgaaattcgtactcaggaagtggcgaatgctgcttcacaagtcgcggcattcccacgcgttcgtgaagcattattgcgtcgccaacgcgcgtttcgcgaattaccaggcctgattgccgatggccgcgacatgggaacggtggtattccctgatgcgccagtgaaaattttccttgacgcctcctcggaagaacgtgcgcatcgccgcatgctacagttgcaggagaagggctttagtgttaactttgagcgccttttggccgagatcaaagaacgcgacgaccgcgatcgtaaccgagcggtagcgccactggttccggcagccgatgctttagtgttggattccaccaccttaagcattgagcaagtgattgaaaaagcgctacaatacgcgcgccagaaattggctctcgcataagcgaccgaatttgcagtacccccgttgcaatggaatgacagcgggtatgttaaacaaccccatccggcatggagccaggtggacgttaaatataaacctgaagattaaacatgactgaatcttttgctcaactctttgaagagtccttaaaagaaatcgaaacccgcccgggttctatcgttcgtggcgttgttgttgctatcgacaaagacgtagtactggttgacgctggtctgaaatctgagtccgccatcccggctgagcagttcaaaaacgcccagggcgagctggaaatccaggtaggtgacgaagttgacgttgctctggacgcagtagaagacggcttcggtgaaactctgctgtcccgtgagaaagctaaacgtcacgaagcctggatcacgctggaaaaagcttacgaagatgctgaaactgttaccggtgttatcaacggcaaagttaagggcggcttcactgttgagctgaacggtattcgtgcgttcctgccaggttctctggtagacgttcgtccggtgcgtgacactctgcacctggaaggcaaagagcttgaattcaaagtaatcaagctggatcagaagcgcaacaacgttgttgtttctcgtcgtgccgttatcgaatccgaaaacagcgcagagcgcgatcagctgctggaaaacctgcaggaaggcatggaagttaaaggtatcgttaagaacctcactgactacggtgcattcgttgatctgggcggcgttgacggcctgctgcacatcactgacatggcctggaaacgcgttaagcatccgagcgaaatcgtcaacgtgggcgacgaaatcactgttaaagtgctgaagttcgaccgcgaacgtacccgtgtatccctgggcctgaaacagctgggcgaagatccgtgggtagctatcgctaaacgttatccggaaggtaccaaactgactggtcgcgtgaccaacctgaccgactacggttgcttcgttgaaatcgaagaaggcgttgaaggcctggtacacgtttccgaaatggattggaccaacaaaaacatccacccgtccaaagttgttaacgttggcgatgtagtggaagttatggttctggatatcgacgaagaacgtcgtcgtatctccctgggtctgaaacagtgcaaagctaacccgtggcagcagttcgcggaaacccacaacaagggcgaccgtgttgaaggtaaaatcaagtctatcactgacttcggtatcttcatcggcctggacggcggcatcgacggcctggttcacctgtctgacatctcctggaacgttgcaggcgaagaagcagttcgtgaatacaaaaaaggcgacgaaatcgctgcagttgttctgcaggttgacgcagaacgtgaacgtatctccctgggcgttaaacagctcgcagaagatccgttcaacaactgggttgctctgaacaagaaaggcgctatcgtaaccggtaaagtaactgcagttgacgctaaaggcgcaaccgtagaactggctgacggcgttgaaggttacctgcgtgcttctgaagcatcccgtgaccgcgttgaagacgctaccctggttctgagcgttggcgacgaagttgaagctaaattcaccggcgttgatcgtaaaaaccgcgcaatcagcctgtctgttcgtgcgaaagacgaagctgacgagaaagatgcaatcgcaactgttaacaaacaggaagatgcaaacttctccaacaacgcaatggctgaagctttcaaagcagctaaaggcgagtaattctctgactcttcgggatttttattccgaagtttgttgagtttacttgacagattgcaggtttcgtcctgtaatcaagcactaagggcggctacggccgcccttaatcaatgcagcaacagcagccgcttaatttgcctttaaggaaccggaggaatcatgaccaagtcagaattgatagaaagacttgccacccagcaatcgcacattcccgccaagacggttgaagatgcagtaaaagagatgctggagcatatggcctcgactcttgcgcagggcgagcgtattgaaatccgcggtttcggcagtttctctttgcactaccgcgcaccacgtaccggacgtaatccgaagactggcgataaagtagaactggaaggaaaatacgttcctcactttaaaccaggtaaagaactgcgcgatcgcgccaatatttacggttaagtttttactcaaacttgaacgcgagaaaagcacctgtcgggtgcttttttcatttctctaatctggaactggaagctgcctcgcagagttttgagcagttttcaccctatcgttaaattcttctgaacgtgcctcggggaacgcaaaactcccaccagacaaccgttcaacaaagttgcacactttctataaacagggagggtgcatgaaaataacgacagtcggcgtatgcataatttgcggaatttttccgttgctgattttgccccaattgcctgggacagtaacccttgcgtttctgactctcttcgcctgtgtactggcatttatccctgttaaaaccgtccgttatatcgtgctgacgttgctgtttttcgtttggggcatattagcagcaaagcaaattttgtgggcaggagaaaccttaactggcgcgacgcaggatgcaattgttgagatcattgctactgacggcatgaccactcattacggtcaaattactcatctacaaggtcgacgtatattccctgcgccaggcctcgtactgtatggcgaatatcttccgcaagcggtttgtgccggacaagtatggtcaatgaaactcaaagttcgtgcagttcatggtcaacttaatgatggcggctttgatagccagcgttatgccattgcccagcatcaaccgctcaccggccgttttctgcaggcaagtgtcattgaaccgaattgtagcctgcgtgcacagtatctggcgtcactacaaacaacgctgcaaccctatatgtggaacgcggttattcttggattaggtatgggggaacggttatccgtctccaaagaaatcaaaaatatcatgcgtgatactggaacggcgcatttaatggcgatatcaggattgcacatcgcttttgcggcgttgctggctgcaggactcattcgcggtgggcaagtttttctgcctgggtgctggatccactggcaaatgccattaattggtggaatctgctgtgctgctttttatgcctggcttacgggaatgcaacctcctgcattgcgtaccgtggtggcgcttgccatttggggaatgcttaagttaagtggacgacaatggagtggctgggatgtatggatatgttgtctggcggcaattttgctgatggatcctgttgccattctctcgcaaagtttatggctatctgccgctgcggtcgcggcactgattttttggtatcagtggtttccctgtccggagtggcagctgccgccggtattgcgcgcggttgtttccctcatccatctgcaactgggaatcaccctcctgcttatgcccgtgcaaattgtcatatttcatggcattagtctgacctcgtttattgcaaatctttttgcaattcccctggtgacatttatcacggttccgttgattctcgccgcgatggttgtgcatttaagcgggccgtttattctggaacaagggttatggtttcttgccgaccggtctttggctttacttttctgggggttaaagagtttgccggaagggtggatcaacattgctgaacgttggcaatggctaacattttccccatggttcttactggtggtatggcgattaaacgcctggcgaacgttgccagcaatgtgtgtggctgtaggcttgctgatgtgcttgccgctgtggcaaaaacctcgacctgacgagtggcaagtgtacatgcttgatgtcgggcaagggctggcaatggtcattgcgcgaaacggcaaagcgattctctatgacacgggactggcctggcccgaaggggatagtgggcaacaactgattatcccctggctccactggcataatcttgaaccggaaggcgttattttgagtcatgaacatctggatcaccggggagggctggactcaatattgcacacatggccgatgttatggatccgaagtccgttaaactgggaacatcatcagccctgtgtgcgtggcgaagcgtggcaatggcaaggattgcgtttcagcgcgcactggcctttacaaggtagcaacgataaaggaaataaccattcctgtgtggttaagattgatgacgggacgaatagcattcttctaaccggtgatattgaagcccccgctgaacaaaagatgctaagccgttactggcagcaaatgcaggcaacattacttcaggtacctcaccatggcagtaatacctcatcatcgttgccattaattcagcgagtgaatggaaaagtggcactcgcatcggcatcgcgctataacgcatggcgactgccctcaagcaaagttaaacatcgctatcaacaacagggttataagtggcttgatactccacatcagggtcaaataacggtcaatttttcagcgcaaggctggcggattagcagcctcagagagcaaattttacctcgttggtatcatcagtggtttggcgtgccagtggataacgggtagaatatgcggctatttcaacaaatgctggttttttgaatgcataacgacaaagatctctctacgtggcagacgttccgccgactgtggccaaccattgcgccttttaaagcgggtctgatcgtggcgggcgtagcgttaatcctcaacgcagccagcgataccttcatgttatcgctccttaagccacttcttgatgatggctttggtaaaacagatcgctccgtgctgatgtggatgccgctggtggtgatcgggctgatgattttacgtggtatcaccagctatatctccagctactgtatctcctgggtatcaggaaaggtggtaatgactatgcgtcgccgcctgtttggtcacatgatgggaatgccggtttcattctttgacaaacagtcaacgggtacgctgttgtcacgtatcacctacgattccgaacaggtcgcttcttcttcttccggcgcactgattactgttgtgcgtgaaggtgcgtcgatcatcggcctgttcatcatgatgttctattacagttggcaactgtcgatcattttgattgtgctggcaccgattgtttcgattgcgattcgcgttgtatcgaagcgttttcgcaacatcagtaaaaacatgcagaacaccatggggcaggtgaccaccagcgccgaacaaatgctgaaaggccataaagaagtattgattttcggtggtcaggaagtggaaacgaaacgcttcgataaagtcagcaaccgaatgcgtcttcaggggatgaaaatggtttcagcctcttctatctctgatccgatcattcagctgatcgcctctttggcgctggcgtttgttctgtatgcggcaagcttcccaagtgtcatggatagcctgactgccggtacgattaccgttgttttctcttcaatgattgcacttatgcgtccgctgaaatcgctgaccaacgttaacgcccagttccagcgtggtatggcggcttgtcagacgctgtttaccattctggacagtgagcaggagaaagacgaaggtaagcgcgtgatcgagcgtgcgactggcgacgtggaatttcgcaatgtcacctttacttatccaggacgtgacgtgcccgcattgcgtaacatcaacctgaaaattccggcagggaagacggttgctctggttggacgatctggttcaggtaaatcaaccatcgccagcctaatcacacgtttttacgatattgatgaaggcgaaatcctgatggatggtcacgatctgcgcgagtataccctggcgtcgttacgtaaccaggttgctctggtgtcgcagaatgtccatctgtttaacgatacggttgccaacaacattgcttacgcaaggactgaacagtacagccgtgagcaaattgaagaagctgcgcgtatggcctacgccatggacttcatcaataagatggataacggtctcgatacagtcattggtgaaaacggcgtgctgctctctggcggtcagcgtcagcgtattgctatcgctcgagccttgttgcgtgatagcccgatactgattctggacgaagctacctcggcgttggataccgaatccgaacgtgcgattcaggcggcactggatgagttgcagaaaaaccgtacctctctggtgattgcccaccgcttgtctaccattgaaaaggcagacgaaatcgtggttgtcgaggatggtgtcattgtggaacgcggtacgcataacgatttgcttgagcaccgtggcgtttacgcgcaacttcacaaaatgcagtttggccaatgatcgaaaaaatctggtctggtgaatcccctttatggtggctattgctgccactctcctggttgtatggcctggtgagtggcgcgatccgtctttgctataaactaaaactgaagcgcgcctggcgtgcccccgtaccggttgtcgtggttggtaatctcaccgcaggcggcaacggaaaaaccccggtcgttgtctggctggtggaacagctgcaacagcgcggtattcgcgtgggggtcgtatcgcggggatatggtggtaaggctgaatcttatccgctgttattgtcggcagataccaccacagcacaggcgggtgatgaacctgtgttgatttatcaacgcactggcgcgcctgttgcggtttctcccgtgcgttctgacgcggtaaaagccattctggcgcaacaccctgatgtgcagatcatcgtaaccgacgatggtttacagcattatcgtctggcgcgtgatgtggaaattgtcgttattgatggtgtgcgtcgctttggcaatggctggtggttgccggcggggccaatgcgtgagcgagcggggcgcttaaagtcggttgatgcggtaatcgtcaacggcggtgtcccccgcagcggtgaaatccccatgcatctgctgccgggtcaggcggtgaatttacgtaccggtacgcgttgtgacgttgctcagcttgaacatgtggtggcgattgcggggattgggcatccgccgcgcttttttgccacgctgaagatgtgcggcgtacaaccggaaaaatgtgtaccgctggccgatcatcagtctttgaatcatgcggatgtcagcgcgttggtaagcgccggacaaacgctggtaatgactgaaaaagatgcggtgaaatgccgggcctttgcagaagaaaattggtggtatttgcctgtagacgcacagctttcaggtgatgaaccagcgaaactgcttgcgcaactaacctcgctggcttctggccactagttacgccgcggcagcgttcgattgatggagtcatgaatgtcgctgccgcacctctcccttgctgatgcgcgtaatcttcaccttgccgcgcaaggcctgttaaacaaaccccgccgtcgagcgtcgttggaggatattccggcaacgatctcccgcatgtccttgctgcaaatcgataccatcaatattgttgtccgtagcccatatctggtgcttttcagccgtctgggagattatcctgcgcagtggctggatgagtctctggcgcgtggagaattaatggaatactgggcgcatgaagcctgctttatgccgcgtagcgattttcgtcttattcgccaccgcatgctggcacctgaaaaaatgggctggaaatataaagacgcctggatgcaggaacatgcggcggaaattgcactgttaattcagcatattcatgataaggggccggtacgttcagccgattttgagcatcctcgtaaaggggcgagcggctggtgggagtggaagccgcataaacgacatctggaaggtttatttactgccggaaaggtgatggtgattgaacggcgcaacttccagcgcgtttatgatttaactcaccgtgtcatgcctgagtggaatgatgagcgcgatctcgtttcgcaagcagaagcagaaatcatcatgctggataacagtgcgcgtagcctgggaatatttcgcgaacagtggctggcagattactaccggctaaaacgtccggcactggcggcgtggcgtgaagcgagggctgaacagcagcaaatcattgctgtgcatgttgaaaaattgggtaatctttggctgcatgctgatttgctgccgctactcgagcgtgcgctcgccggaaagctcactgcaacgcacagcgcggtactttcgccttttgatcctgttgtctgggatcgcaaacgcgcggagcagctttttgattttagctaccggctggagtgctatatcccagcgccgaaacgccagtatggctattttgttctgccgttattacatcgtgggcaattagttgggcgaatggatgccaaaatgcatcgccagacaggcatccttgaagttatctctctgtggttacaggaaggcattaaaccgacgacaacgctgcaaaaagggttacgtcaggcgattactgatttcgctaactggcagcaggcaacgcgggtgacattaggacgctgctcgcaaggcctctttactgattgtcgcgccggctgggaaatagaccccgtcgcataaatgattatgataagatttatgcattcataacccgatccatctggaggaactatggatcatcgtctgcttgaaatcattgcctgcccggtttgcaacggaaaactttggtataaccaggaaaaacaagagcttatttgcaaactggacaacctggctttcccgctgcgcgatggcattccagtgttgctggaaacggaagcccgcgtgttgactgctgatgagagtaaatcatgagttttgtggtcattattcccgcgcgttacgcgtccacgcgtctgcccggtaaaccattggttgatattaacggcaaacccatgattgttcatgttcttgaacgcgcgcgcgaatcaggtgccgagcgcatcatcgtggcaaccgatcatgaggatgttgcccgcgctgttgaagtcgctggcggcgaagtatgtatgacgcgcgccgatcatcagtcaggtacagaacgtctggcggaagttgtcgaaaaatgcgcattcagcgacgacacggtgatcgttaatgtgcagggtgatgaaccgatgatccctgcgacaatcattcgtcaggttgctgataacctcgctcagcgtcaggtgggtatggcgactctggcggtgccaatccacaatgcggaagaagcgtttaacccgaatgcggtgaaagtggttctcgacgccgaagggtacgcactgtacttctctcgcgccaccattccgtgggatcgtgatcgttttgcaaaagaccttgaaaccgtaggcgataacttcctgcgtcatcttggtatttatggctaccgagcaggctttatccgtcgttatgttacctggcagccaagtccgttagaacatatcgaaatgttagagcagcttcgtgttctgtggtacggcgaaaaaatccacgttgctgtcgcccaggaagttcctggcacaggtgtggatacccctgaagatctcaagcgcgttcgcgccgaaatgcgctaatttcacttcacgacactccagccaattttgggaggagtgtcgtaccgttacgattttcctcaatttttcttttcaacaattgatctcattcaggtgacatcttttatattggcgctcattatgaaagcagtagcttttatgagggtaatctgaatggaacagctgcgtgccgaattaagccatttactgggcgaaaaactcagtcgtattgagtgcgtcaatgaaaaagcggatacggcgttgtgggctttgtatgacagccagggaaacccaatgccgttaatggcaagaagctttagtgcgcccggaaaagcccgacaactggcatggaaaaccaccatgctggcaagaagtgggactgtccgtatgccgactatttatggtgtgatgacgcacgaagaacaccccggccccgatgtcctgctactggagcgaatgcgtggtgtttcggtggaggcaccagcccgaacaccagaacgctgggaacaactcaaagatcaaatcgttgaagccttactggcctggcaccgtcaggacagtcgtggttgcgtcggcgcggtcgacaatactcaggaaaatttctggccctcatggtaccggcaacatgttgaagtgctatggaccacgctcaatcagttcaataacaccggtctaacgatgcaggataagcggatcctgtttcgcactcgcgaatgtctcccggcattatttgaaggctttaacgacaattgtgtactgattcacggtaacttctgtttacgtagcatgctgaaagattcgcgcagcgatcagttactggcgatggtcggaccgggactaatgctttgggcaccgcgagaatacgaactgttccgactaatggataattctctggcggaagatttgctctggagttatctgcaacgcgcgccagtggcggagtcgttcatctggcggcgttggttgtatgtgttatgggatgaagttgcgcaactggttaataccggacgatttagtcggcgcaacttcgatctggcatcaaaatcactcttgccgtggctcgcctgacgaaccttttagccactgccagatgcggccaagcgtttcatagccaacacgatcgctatgcatcaaccagaccggagaagggattgcccgttcccacggattaagcggcgagtcgatggccaactgattcgccggggctggtagcggatttaacccttcctgctgaaaaaagatcatcgcccgcggcagatgtgatgcggaggtcaccagcaggaaaggtgcgtcaccaatcgcctgtttcactgctgcagcttcttcttcggtatcttttggcaaatccagggtgataatttgctcgcgcggcacgcccagcgattgcgcaactctggcacctacttccgctgtgctcaccgtattggttttagctacgcctcccgtaaagatcagttttgatcccggattttcgcgccataagcgaataccttcattcaggcgtggcagactgttattgattaaattagagctcggcgcccactgcgggttccaggtataaccacctccgagcaccacgatatagtccactttttgcgaattattccatgtcggataagtgctttcgatgggacgcaacaggcggtcggctatcggttgcaaactcaataacaagagcgccagccacccaatgctaataaaaatcttcccggttttttgaaaacggctaaaccacagcagcgccaggccagcgccaataatcaacaacatcagcggaagtggcagcaacatattgccaatcacttttttcagtgtaaaaagcatcctttctggttccttttttgaccatatagcaagggatcgccagcgatattacaccagacgggttcattctcgccgtggctgtgacaaaatagcgtctttatcagaaaacgtcttagccaaccggtggagaaagcaatgcaggatcgcaattttgatgatattgcggaaaagttttcccgtaacatttacggcaccaccaaagggcagcttcgacaggctattctgtggcaggatctcgatcgcgtgctggcggaaatgggcccgcaaaaactgcgtgtgctggatgctggcggcggagaagggcagaccgcaatcaaaatggccgagcgcgggcatcaggtcattttatgcgatctttctgcgcagatgatcgaccgcgcaaaacaggcggcagaagcaaaaggtgtgagcgacaacatgcaatttatacattgcgccgctcaggatgttgcttcgcatttggaaacgcccgttgatctgatattgttccatgcggtgctcgagtgggtggccgatccccgcagcgtattacagaccctgtggtcagtgttgcgtccaggcggcgtattgtcgttaatgttctacaatgcgcatggtttgttgatgcataacatggtcgccgggaattttgattacgtgcaggcgggaatgccgaaaaagaaaaaacggacgctttcgccagattatccacgcgacccggcgcaggtttatctgtggctggaagaagctggttggcaaattctgggtaagacaggcgttcgcgtgtttcatgattatctgcgcgagaagcaccagcagcgcgactgctatgaagcattacttgaattagaaacgcgttattgccgtcaggaaccgtatattaccttggggcgttatattcatgtcaccgcgcgcaaaccgcagagcaaggataaagtatgagtgaattttcccagacagtccccgaactggttgcctgggccagaaaaaatgacttctccatctcgctgccggtagaccgactctcttttctgctggcggttgccacgctgaacggcgagcgtctggatggtgagatgagtgaaggcgagctggtggatgcattccgccatgtgagtgatgcgtttgagcaaaccagcgaaaccatcggcgtgcgcgccaacaacgcgatcaacgacatggtgcgtcaacgtctgctgaaccgctttaccagcgagcaggcggaagggaacgcaatttaccgtctgacgccgctcggcatcggcatcactgactattacattcgtcagcgcgagttttctacgctgcgcctttctatgcaattgtcgattgtggcgggtgagctcaagcgcgcagcagatgccgccgaagagggcggtgatgaatttcactggcaccgtaatgtttatgcgccactgaaatattcggtagcagaaattttcgacagtatcgacctgacgcaacgtctgatggatgaacagcagcagcaggtgaaggatgatatcgcccagttgttgaacaaagactggcgggcggcgatttccagctgtgaattgttgctttcagaaacttccggaacgctgcgtgaattgcaggatacgctggaagcggcaggcgataaattgcaggccaacctgttacgcattcaggatgcgacgatgacccatgacgacctgcattttgtcgatcgtctggtgttcgatcttcagagcaaactcgaccgtattatcagttggggccagcaatccatcgacttgtggattggctacgaccgccacgtacacaaatttattcgtactgcgatcgatatggataaaaaccgcgtctttgctcagcggttacgtcagtcggtacaaacctattttgatgagccgtgggcgctaacttatgccaatgccgatcgtctgctggatatgcgtgacgaagagatggtactgcgcgatgaagaagtgactggggaacttcctgaggatctggagtacgaagagtttaacgagatccgcgaacagctggcggcgatcatcgaagaacaacttgccgtgtacaaaaccagacaagtgccgttggatcttggtctggtggtacgcgaatatctgtcacagtatccgcgtgcacgtcactttgacgttgcgcgcattgttattgatcaggcggtacgtcttggcgtagcgcaagcagatttcaccggactgccagcgaaatggcagccgattaatgattacggagccaaggtacaggcgcatgtcatcgacaaatattgaacaagtgatgccggttaagctggcgcaggcgctggcgaatccgttatttccggcgctggatagcgccttacgttcaggccgtcatattggcctcgacgaactggataatcatgcattcctgatggattttcaggaatatctggaagagttttacgcgcgttataacgttgagcttattcgtgcaccggaagggttcttctatctacgcccacgttccaccacgctgatccctcgttccgtcttgtcggaactggatatgatggtcgggaaaatcctctgttatctctatctcagcccggaacggctggcgaatgaggggatttttactcaacaggaactgtacgacgaactgctcaccctggccgatgaagcgaaactgctgaaactggtgaacaaccgttcaaccggttcagacgttgaccgtcagaagttgcaggaaaaagtacgttcttcgctcaaccgtctgcgtcgtttaggcatggtgtggtttatgggccacgacagcagcaagttccgcattaccgaatcggtgttccgcttcggagccgatgtgcgtgctggcgacgatccccgtgaagcacagcgtcgcctgattcgtgatggtgaagcaatgccgattgaaaatcatctgcaactcaacgatgaaaccgaagagagtcagccagatagcggagaggaagaataatgattgaacgcggtaaatttcgctcactgacgctgattaactggaacggcttttttgcccgaacttttgaccttgacgagctggtcacgacgctttctggcggtaacggggcgggtaaatccaccaccatggcggcgttcgttacggcgcttatccccgacctgaccctgctgcatttccgtaacactacggaagccggggccaccagcggttcgcgcgataaaggtctgcacggtaagctgaaagcgggtgtctgttattcgatgctcgacaccattaactcgcgccaccagcgtgtagtggtcggtgtgcgtctgcaacaggttgccggacgcgatcgtaaagtggatatcaaaccatttgccattcagggcctgccgatgtcggtgcagccgacacaactggtgaccgaaactctgaacgaacgccaggcgcgcgtgctgccgcttaacgagctgaaagacaagctcgaggcgatggaaggcgtgcagtttaaacagttcaactccattaccgattaccactcgctgatgttcgagctgggcatcatcgcgcgtcgtctgcgctcagcgtctgaccgtagtaaattctatcgtctgatcgaagcctcgctgtatggcgggatctccagcgccattactcgttctctgcgcgactacctgttgccggaaaacagtggggtgcggaaagcgttccaggacatggaagcggcgctgcgtgaaaaccgcatgacgctggaagcgattcgtgtcacccagtcggaccgtgacctgtttaagcatctgatcagcgaagccaccaactacgtggcggcggactacatgcgtcacgccaacgagcgccgtgttcatctcgataaggccctggagtttcgtcgcgagctacatacttcgcgtcagcaactggcggctgagcagtacaaacacgtcgacatggcgcgagagctggctgagcacaacggtgccgaaggcgatctggaagcggattatcaggcggccagcgatcacctgaacctggtgcaaaccgcactgcgtcagcaggagaagatcgaacgctacgaagcggatctcgatgagctgcagatccgtctggaagagcaaaacgaagtggtggcagaagccatcgaacgccaggaagagaacgaggctcgtgcggaagctgccgaactggaagtggacgagctgaaaagccagcttgctgactaccagcaggcgctggacgtccagcaaacgcgcgcgatccagtataaccaggcgattgctgcgcttaatcgtgccaaagaactgtgccatctgccggacttaaccgccgacagcgctgccgaatggctggaaaccttccaggcgaaagagctggaagcgaccgaaaaaatgctctctcttgagcagaaaatgagcatggcgcaaaccgcgcacagccagtttgagcaggcttatcagctggtggtggcaatcaacggcccgctggcgcgtaacgaggcgtgggatgtcgctcgcgaactattgcgcgaaggggtcgatcagcgtcacctggcagagcaggttcagccgttgcggatgcgcttaagcgaactggaacagcgtctgcgtgagcagcaagaagctgagcgtctgctggcagatttctgcaaacgtcagggcaagaattttgatattgatgaactggaagctctgcatcaggagctggaagcacgcattgcctctctttccgatagcgtctctaacgcccgagaagagcggatggcactgcgccaggagcaggaacagctgcagtctcgcattcagagtttgatgcagcgtgcgccggtttggctggcagcgcaaaacagtctcaaccagttgagcgaacagtgcggcgaagagttcacctccagccaggatgtcaccgaatttctgcaacagttgctggagcgcgagcgcgaggcaattgttgaacgcgatgaagtaggcgcgcgcaaaaacgccgtcgatgaagagatcgaacgtttaagccagccaggtggttctgaagatcagcgtctgaacgcgctggcggagcgttttggtggtgtgctgctgtcagaaatttatgacgacgttagcctggaagatgcgccgtacttctcagcactgtatggcccgtcacgccacgccatcgtggtgccagatctgtcacaggtaaccgaacacctggaaggcttgaccgattgcccggaagatctctatttgatcgaaggggatccgcagtcattcgatgacagcgtgttcagcgttgatgagctggaaaaagcggtggtggtgaaaatcgccgatcgtcagtggcgttattcacgtttcccggaagtgccgctgtttggtcgtgctgcgcgtgaaagccgtattgaaagcctccatgccgagcgggaagtgctttccgaacgcttcgccacgctctcctttgatgtacagaaaacccagcgtctgcatcaggcgttcagccgctttatcggcagtcatctggcggtggcgtttgagtctgacccggaagcagaaatccgtcaactgaacagccgtcgcgtcgaactggaacgggcgttgagtaatcatgaaaatgataaccagcagcagcgtattcagtttgagcaggcgaaagagggcgttacggcgctgaaccgcattctgccgcgtctcaacctgttggctgatgacagcctggcggatcgcgtcgatgaaatccgcgaacgtctggatgaagcccaggaagccgcgcgttttgttcagcagtttggcaatcaactggcgaaactggaaccgatcgtttcggtattgcagagcgacccggaacagttcgaacagttaaaagaagattacgcgtactctcagcagatgcagcgcgatgcccgtcagcaggcgtttgccctgacggaagtggtgcagcgtcgtgcgcactttagctactctgactcggcagaaatgcttagcggtaacagcgatctcaacgaaaaactgcgtgaacgtctggaacaggcggaagcggagcgtacccgcgctcgtgaagcgttgcgcggacacgcagcgcagttgaatcagtacaaccaggtgctggcttcgctgaaaagttcgtatgacaccaaaaaagagctacttaacgatctgcaacgtgaattgcaggatatcggcgtgcgtgctgatagcggggcagaagagcgggcacgtattcgccgtgacgagttgcacgcgcaactgagcaataaccgttcacgacgcaatcaactggaaaaagcgcttacattctgcgaagcggagatggacaacctgacccgtaaactgcgcaagctggagcgggattactttgagatgcgcgagcaggtagtgaccgccaaagcgggctggtgtgcggtgatgcgcatggtgaaagataatggcgttgagcgtcgcttacaccgtcgtgagctggcttatctctccgctgatgatttgcgttccatgtcggataaggcgttaggtgcgctgcgtctggcggtggcagataacgaacatctgcgcgacgtgctgcggatgtcggaagatccaaaacgtccggaacgtaaaattcagttcttcgtggcggtttatcagcatctgcgtgaacgtattcgtcaggatattattcgtaccgatgatccggtggaagctatcgaacagatggagatcgagcttagccgtctgaccgaagaattaacctcccgtgaacagaaactggcgatcagttcccgcagcgtggcgaacatcattcgcaaaaccattcagcgcgagcagaaccgtatccgtatgctcaaccaggggttgcagaacgtatcgtttggccaggtgaacagcgtacgtctgaacgtgaacgtacgtgaaacgcacgccatgctgctggatgtgctctctgaacagcacgagcagcatcaggatctgtttaacagcaaccgcctgaccttctcagaagcgctggcgaaactgtatcaacgtcttaacccgcagattgatatggggcagcgcacgccgcagaccatcggtgaagaactgctggattaccgcaactatctggaaatggaagttgaggttaaccgtggttccgatggctggttgcgtgcagagtctggtgcattgtcgaccggtgaggcgattggtaccggtatgtcgattctggtgatggtggtacaaagctgggaagatgaatctcgccgcctgcgcggtaaagatatctctccttgccgcctgctgttcctcgatgaagcagcgcgactggatgctcgttctatcgccacgctgtttgaattgtgtgaacgtttgcaaatgcagctcatcatcgcagcgccggaaaatatcagtccggaaaaaggcaccacctataaactggtgcgtaaagtcttccagaataccgaacacgttcacgtcgtcggcctgcgaggatttgcgccgcaactccctgaaacgcttccaggaagtgacgaagcgccttcccaggcgagttaaaatgaaggcggcagcaatgccgccttttctttttccgaaaactccgtttctgcactaaaaaagtggcacattacggcgcgcttttctttaaacttctttacattaggttatgtaaaaacgtatcggcgtttatatactgaagataagcctgatgagtaacaggcttgctcgtcatactttcgtgagtattggcgttgtacaggcaagtcgtaaaataacagcctggctattcagagtatgataaaaacagggggcaagggatgttgcttaatatgatgtgtggtcgtcggctgtcggcaatcagtttgtgcctggccgtaacattcgctccactgttcaatgcgcaggccgatgagcctgaagtaatccctggcgacagcccggtggctgtcagtgaacagggcgaggcactgccgcaggcgcaagccacggcaataatggcggggatccagccattgcctgaaggtgcggcagaaaaagcccgcacgcaaatcgaatctcaattacccgcaggttacaagccggtttatcttaaccagcttcaactgttgtatgccgcacgcgatatgcaacccatgtgggaaaaccgtgatgctgttaaagccttccagcaacagctggcagaggtggcgattgccggtttccagccgcagtttaataaatgggtagagttactgaccgatcctggtgttaacgggatgacacgcgacgtggtgctctctgatgcgatgatgggctatctccatttcattgcaaatattccggtcaaaggcactcgctggctatatagcagtaaaccttatgcgctttcaacgccgccgctttcggtgattaaccaatggcagctggcgctggataaaggtcaattgccgacgtttgttgtaggattggcaccgcagcatccgcaatatgcggcgatgcatgaatcgttactggccttactcagtgacaccaaaccgtggccccaactgaccggcaaagcaacgttgcgcccaggacagtggagtaacgacgtaccggcgttgcgcgaaatattgcaacgtacaggcatgttggacgggggaccgaaaattacgctacctggcgatgacacgccaactgacgcggtagtcagcccatccgctgttactattgaaacagcagaaactaagccgatggacaagcaaactacgtctcgtagtaaacctgcgcctgtcgttcgtgccgcctacgataatgaactggtggaagccgttaaacgttttcaggcatggcaaggattgggggcagatggtgctattggcccggcaacgcgtgactggttaaacgtaacgcccgcccagcgtgctggcgtgttggcactcaacatccagcgattgcgcttgctgccaacagagctttctaccgggatcatggttaacattccggcctattcgctggtctactatcagaacggcaatcaggtgctggattcgcgagtcattgtcggtcgccccgatcgcaaaacgccaatgatgagcagtgcccttaacaacgtagtggtaaacccgccgtggaacgtcccaccaactctggcacgcaaagatattctgccgaaagtgcgcaacgatccgggatatctcgaaagccatggctatacggtgatgcgcggctggaacaacagagaagcgattgacccatggcaggttgactggtctacaatcacggcctcgaatttaccgttccgcttccagcaggctccaggcccacggaactcgctggggcgctataaattcaatatgccgagttcagaggccatttatttgcatgacacgccgaaccacaatctgttcaagcgtgatacacgcgcattgagctcaggctgtgtacgagtgaataaagcttccgatctggcgaatatgctgttgcaggatgcaggctggaatgacaaacgtatttctgatgcgctgaagcagggcgatacgcgttacgtcaatattcggcagtcgattccggtgaatctctactatctgacggcctttgttggtgcagatggtcgtacccagtatcgtacagatatttacaattatgatctgcctgcgcgatccagctcgcaaatcgtatcgaaagcggaacaattaatcaggtaaatgaagcagttcggggaaatcagttgtcgtaataattagcatgatcgggggcgattctctgcagcccccgtcactgctggggttgagtcatcttgacgtctgctttacgggcggttaaggtgcctcttgtgcgccagaagtgcatataaacgataacattgacctgtagacttgattatcatggacaaattcgacgctaatcgccgcaaactgctggcgcttggtggcgttgcactcggtgccgccatcctgccgaccccggcgtttgcaacactctctaccccacgcccgcgcattttgacactcaataatcttcataccggagagtcaatcaaagcggagtttttcgatggcagaggctatattcaggaagaattggcaaaacttaaccattttttccgcgattaccgcgcgaacaaaataaagtccatcgacccaggattattcgaccagttgtatcgcctgcaagggttgttaggcacccgcaaaccggtgcaactcatttccggttatcgttccattgataccaacaatgaactacgcgcccgcagccgtggagtagcgaagaaaagctatcacactaaaggccaggcgatggatttccacattgaaggtatcgcgttaagcaatattcgcaaagccgcgttatctatgcgcgcaggtggtgtaggatattacccacgtagtaactttgtgcatattgataccgggccagcacggcactggtagtaatcgcttaacgaaacaggggcagtatgaactatcgtattattccggtcaccgcattctcccagaactgttcattgatctggtgtgaacaaacccgtctggccgcactggtcgatcctggcggcgatgcggaaaaaatcaaacaggaagttgatgccagcggcctgacactgatgcagatcctgctgactcatggtcatctggaccacgttggcgcagcggcggaactggcgcaacattacggcgtgccggtttttggcccggaaaaagaagatgagttctggctgcaaggcttgcctgcgcaaagtcgtatgtttggtctggaagagtgccagccgctgacgccagatcgttggctgaacgaaggcgataccatcagcatagggaatgtgactttacaggtgttacattgccctgggcatacgccgggtcatgtcgtgttttttgatgatcgggcaaagctgctgatttctggcgacgttattttcaaaggtggagtagggcgcagtgacttcccgcgtggcgatcataatcaactgatttcttcaatcaaagataaattgctgccactgggggatgacgtgacatttattccgggtcacggaccattatccacacttggttatgagcgcctgcataatcccttcctgcaagacgaaatgcccgtctggtaaaggtgcataaaaaagcccgctttcaagcgggcttcatcggttttaacgcttacagcactgccacaatcgcttcgcacagcggcgccatgttatctggtgtcatcccagctacgtttacgcgaccagaagcaacagcatatacgccaaactcttcgcgcagacgcagcacttgttcttttgtcaggccactgaaggagaacatgccgttctgtttgatgataaagctgaagtcgcgatttgcgcctttttcctgcagcgtattgacgaacaactgacgcatacgctgaatacgctggcgcatatcagtcagttcttgttcccaaatcgcacgtaacgcatcgttgctcaggatggtggcaacaacagaagcgccgtgtgctggtgggttagagtagttagcacgaatcgccgctttcatttggctgaatgcgcgttcaacagtttcactgtcagcagcaaccagagtacaagcgccaacacgctcgttgtacaggccaaagtttttagagtaggaactggcaacaatcagctccttatgcagagccgcgaaagcgcgcagtccttcagcatcttcttccagaccacgggcaaaaccctggtaagcgaagtcaaacagcggtaaccagcctttctcaacggagagttgtgccagtgtctgccattgttccagcgtagggtcgatgccggttgggttatggcagcagccatggaacagcactacgtcgccagcctgagcttcgttcaggctgttaatcagtgcatcgaagtcaagagtgtgattttccgcatcataataagcgtattcacgaacttccagacctgcagagttaaagacgctcttatggttcggccagcttgggttgctcacccacacacgcttaacgctggtattttttgccaggaaatcggcagccacgcgtagtgcgccagtgccacccggagtctgtgccgtgcgagcacgtttgtcattgatcagggcgctacctttaccaaacagcagttcctgagtgcagcgaccaaattcagggaggccgtcaatgccgaggtaatttttggtggtttcattttcgagcagatactgttcagcctttttcacgctggtcagtaccggggttttacccgtctcatctttatagacaccaatcccgaggttaattttgccgggacgttcatcggcacgaaacagatcggccaggcccagaatcgggtcggcaggagcggcggtaatgttctcaaacatgacgaggttccattatggttacagaagggaagtccgctatcagggtaacgggagatttacaaaattccaactattactgatgaaaacgcaggctgtttttgcaagacgtgagattgctctggaaggcataaaaaaaacaggaccaaagtcctgttttttcggcatttaacaaagaggtgtgctattagaactggtaaacgatacccacagcaacggtgtcgtcagaacctacgcccagtttgttgtcagaatcgatctggttgatgatgtagtcaacataggtggacatgtttttgttgaaatagtaggttgcgcccacttcaaagtagttcaccagatcaacatcaccgataccttctacgtctttcgctttagatttggtgtaagcgatggacggacgcagaccgaaatcaaactggtattgcgcaactaacagaacgtcttgcgttttgttggcgaagccgctggtgtttgtaaatttattagtgatcggcgtagcgttacgggtttcaccgtagttcgctgccaggtagatgttgttcgcgtcatacttcagaccagtagcccactgttcagcttttttgcctttgccaagggaagactcttcctgcaggttggtacggtcagcggcaccataagcaccaacgataccaaagccttcgtattcgtagctgatagaaccgccaacaccgtcgccgttagagcggcgtgcagtgtcacgctcgtttttacccaggtactgaacagcgaagttcagaccatcaaccagaccaaagaagttggagttacgataggtagcaacgccgccaacacgaccaacgaagaaatcatcgctgtatgcagtatcaccaccaaattctggcagcatatcggtgtaacccagtgcatcataaaccacaccgtagttacggccgtaatcgaaagaaccaacgtcagcgtatttaagacccgcgaatgccagacgcgttttgttaccagtttgagcgtcagcgccctcagagttgttaccctggaagttatattcccactgaccataaccggtcagatcggaattgatttgagtttcccctttaaaaccaagacgggcataggtcatgtcgccattgccaccgtaactgttttcaccgttacccttggagaaataatgcagaccgacagctttaccgtacagatctactttgttgccatctttgttatagatttctgcagcgtttgcagtacctgctactaacagagcagggacgatcactgccagaatattgcgcttcatcattatttattaccctcatggttttttttatgacacctgccactgccgtcaataagttctgtcaataaaaatttacggaactattgatgagagtttggtgtctttatgtgtctgcaggcatctttccattcaaactaacgtttcgctaccgtgaaagtgctacaaagataaagatttagtttcaaaaagaaaaagtatgtgacaaaaagtaaaaattaaggaactttgtgaacaccgtcatatttccatagaagcgtgatgatatttacagcaatttttatctatttatatgattttcttatatttaaattaactaaacggaaattttgtttctgatggaaactttatcgaccaggcacaaaatcttctttcagacatccagaatgccaaaaatttgtatgaaaattgtgctatcagctaagaaaaaactaatccgcaataagaatgcagattattttttgtgcgtaaatgttgcagcgtaatattccgtaacaggatgatcgttatggcggggttgcaaatagattgcttgacttaacaaacagataacttgacagaaaggataaaaaaagagccagcgggcgctggctcttgaagacgctaaattagaagctggcgttacgcggagtacgtgggaacggaataacatcacgtacgttttgcacgccagttacgtaagcaatcaggcgttcaaaaccaagaccgaaacctgaatgcggaacagtaccgtagcgacgcagatcgcgataccaccagtaatcttctttgttcaggcccatttcaagcatacgctcgtccagcacgtccagacgttcttcacgctgggagccaccaatgatctcaccgatgcccggagccagaacgtccatagccgcaacggttttaccgtcttcgttaaggcgcatatagaacgctttaatatctttcggatagtttttaaccactactggtgctttaaagtgttcttccgccagataacgctcatgctcagaagagagatcgacgccccagtaaaccgggttttcaaacttcctgccgcagttttcgagaatggtcactgcgtcggtgtaatccacctgcgcgaaatcggcctcaatgaagcgttccagacgtgaaacggcatctttatctacgcgttcagcgaagaatttcatgtcgtcagcgcgttcttcgagaaccgctttgaagacatatttcagcatggcttcagccagacctgcgatatcgttcaggttagcaaacgccacttccggctccagcatccagaattccgccaggtgacggctggtgttggagttttcagcacggaaagtcgggccgaaggtataaattttggacaatgcgcaagcgtaggtttcgccgttcaactggccagatacggtcaggaaagactctttaccaaagaagtctttgtcgaaatccactttgccctgatcgttacgcggcaggttttccagatccagcgtagaaacacggaacatttcgcctgcaccttcggtatcagatgcggtaatcagtggcgttgaaacccagaagaatccctgctcgttaaagaagcgatgcagcgcctgcgccagcgtatggcgaacgcgcgcgacggcaccaatcaggtttgtgcgcggacgcaggtgagcgacttcacgcagatactcaatgctgtggcgttttgccgccatcgggtaagtgtctggatcttcaacccaaccagcaacttcaaccttgctggcctgaatttcaaattgttgcccctggcccggcgacgccacgactttacccgtcacaatgaccgagcagccggtggtcagacgcaggacgtcttcattgtaattgggcagagaattattgatgacagcctgtacaggatcaaagcaggaaccgtcataaacggcgaggaaggagatgccagcttttgaatctcggcgggtacgtacccatccgcgcacggtgacttcgctgtcaacggctacgcggccctggagtacgtcggctacaggcacaacgctcataatattctctctgttaatagtcggaaaaaataaacacttgtccacccgtaaatggggggatacctatgttacctggcatctgcaatcagacaagcagaattcgcaaatgcagcgaaagatttcggaattaaaggtaaaaaaagggagccgattagctccctgatgatattaactggcttttttaatatgcggaaggtcgaacgctttgcgcagcgcccgaacaaacgctttatcgtggcagatagttttgccagggctgtcagaaagtttcgccaccggtttaccgttacactctaccaacttaatgacaatattcaggggttttacctgggggatatcgcaggtcaggcgagtcccaataccaaaacttaattgcacgcgggaagagaagtggcggtatagctcaaccgctttgcgtaaatccagattgtcagagaaaaccagcgttttactctgtggatcaattcccagcttttcataatgtgcaatggctttttcaccccattcaaccgggtcgccagagtcatggcgcaggccctgatagcgactggcgaactcgacaccgaaatcacgcaggaaagcatccatagtgatgcagtcggttaatgcaatgccaagttggtcgggatactcttccagccaggcagcaagtgcagctcgctggctgttggctagatccgggctgatttgctgatgcgcctggaaccattcgtgtgcctgtgttcccatcggcgtgagggaaagccgacgcgccagatcgtagttgctggtgcccacgaaccaggattcctggtgcagacgtttcacgatggtttcttgtacttcgcgagaaaaacggcggcgggtgccaaaatccatcagatggaagcgcgacatatcaagaccggcggttaatgccgagaagtcgactaatttgttttccagcgtgtcgagggcttgcgcaacgtcggcctgcggtgagcgatagcgatgtaccatttcactgataaccgccagcaaaggaacttcccagaggatgacttcacgccacgggccgcttaaacgaatatccagcttgccattatcgttggacacggtgacttgttccgggttaaagcggaactcgcgtagccagttaagatagtcggccttaaagaaaggcagggcagagagccactgatattcatcatcctgcaggcgcaggtgctgcatcgcctgaacctgttcacgaatagcatcggcataaatacccagcagatcgtcacctcggcaacgaaactccgccgcgacatgcacatcgtaatagtgatgaaacacggcttgctgcatatgcaacttataagcatctgtatccagcaacgagtgcagaacaggagaagcgaattgtgtcataggtgcgcagtagcgtcctcgtacaggagcgtttagtacaataaacatcttcaggaactgctggagtataccttgtttcgcaatttattgaaccccgatcacaccatatgccacctttctggtcgatggcataacgcggtgtatgttataaaaatgtagcaataaaggcgtttgtacctgaaaagatgaagattctgcatagcgcgatttacgcaacaggaatagactgaacaccagactctataaaagatgctaaaggttatttatgactcaacagccacaagccaaataccgtcacgattatcgtgcgccggattaccagattactgatattgacttgacctttgacctggacgcgcaaaagacggtcgttaccgcggtcagccaggctgtccgtcatggtgcatcagatgttccgcttcgtctcaacggcgaagacctcaaactggtttctgttcatattaatgatgagccgtggaccgcctggaaagaagaagagggcgcactggtcatcagtaatttgccggagcgttttacgcttaagatcgttaatgaaattagcccggcggcgaatactgcgctggaagggctttatcagtcaggcgatgcgctttgcacccagtgtgaagccgaaggtttccgccatattacgtattatctcgaccgcccggatgtgctggcgcgttttaccaccaaaattattgccgataaaaccaaatatcccttcctgctttccaatggtaaccgcgttgcgcaaggtgaactggaaaatggacgtcattgggtacagtggcaggacccgttcccgaaaccgtgttacctgtttgcgttggtggctggtgattttgatgtactgcgcgataccttcactacccgctctggccgtgaagtggcgctggagttgtatgtcgatcgtggcaaccttgatcgtgcgccgtgggcaatgacctcgctgaaaaactccatgaaatgggatgaagaacgcttcggcctggagtatgacctcgacatctatatgatcgtcgcggtggatttcttcaatatgggcgcaatggagaataaggggctgaatatctttaactccaaatatgtgctggcccgcaccgacaccgccaccgacaaagattacctcgatattgaacgcgttatcggccatgaatatttccataactggaccggcaaccgtgtcacctgccgcgactggttccagctcagtctgaaagaaggtttaaccgtcttccgcgatcaggaattcagctctgaccttggttcccgcgcggtaaaccgtatcaataatgtgcgcaccatgcgcggattgcagtttgcagaagacgccagcccgatggcgcacccaattcgcccggatatggtcattgaaatgaacaacttctacaccctgaccgtttacgagaagggcgcggaagtgattcgtatgatccacactctgcttggcgaagaaaatttccagaaagggatgcagctctatttcgagcgtcatgatggtagcgcagcgacctgtgacgattttgtgcaggcgatggaagatgcgtcgaatgtcgatctttcccatttccgccgttggtacagccagtccggcacgccggttgtgaccgtcaaagacgactacaatccggaaactgagcagtacaccctgaccatcagccagcgcacgccagctacaccggatcaggcagaaaaacaaccactgcatattccgtttgccatcgaactgtatgacaacgaaggcaaagtgatcccgttgcagaaaggcggtcatccggtgaattccgtgctgaacgtcacccaggcggaacagacctttgtttttgataatgtctacttccagccggtgcctgcgctgctgtgcgaattctctgcgccagtgaaactggaatataagtggagcgatcagcaactgaccttcctgatgcgtcatgcgcgtaatgatttctttcgctgggacgcggcgcaaagtttgctggcaacctacatcaagctgaacgtcgcccgtcatcagcaagggcagccgttgtctctgccggtgcatgtggctgacgctttccgcgcggtgctgctcgatgagaagattgatccggcgatggcggcagaaatcctgacgctgccttccgtcaatgaaatggcagaactgttcgatatcatcgacccgattgctattgccgaagtacgcgaagcactcactcgtactctggcgactgaactggcagatgagctgctggctatttacaacgcgaattaccagagcgagtaccgtgttgagcatgaagatattgcaaaacgcactctgcgtaatgcctgcctgcgcttcctcgcttttggtgaaacgcatctggctgacgtgctggtgagcaagcagttccacgaagcaaacaatatgactgatgcgctggcggcgctttctgcggcggttgctgcacaactgccatgccgtgacgcgctgatgcaggagtacgacgacaagtggcatcaggacggtctggtgatggataaatggtttatcctgcaagccaccagcccggcggcgaatgtgctggagacggtacgtggtctgttgcagcatcgcgcatttaccatgagcaacccgaaccgcattcgttcgttgattggtgcgtttgcgggcagcaacccggcagcgttccatgccgaagatggcagcggttaccagttcctggtggaaatgcttaccgacctcaacagccgtaacccgcaggtggcttcacgcctgattgagccgctgattcgcctgaaacgttacgatgccaaacgtcaggagaaaatgcgcgcggcgctggaacagttgaaagggctggaaaatctctctggcgatctgtacgagaagatcaccaaagcactggcttgatacttttgagccaaaatgcttgacgcgtcttatcaggcctacaagtccgttgaaattgctggttttgtaggctggataaggcgttcacgccgcatcaggcagtcgtgcccaactgcctgatgcgacgcttgacgcgtcttatcaggcctacaatcccgttgaaaatgctggttttgtgcgccacatccggcatattaaccatgacgtcgaatcggttgttcagagtgcccacgttgcatcacccgctgcaacacttccgcttccagctctgctaatcgtaccgaccctaaccggcgcggacgggggatatccaccgtcaaatccagaccaatttttccctcttcaattaacaacacccggtcagccatcgccaccgcttcgctcacatcatgcgtcaccagcaaaacggtaaaaccgtgcttcagccaaagcgacacaatcaaatcctgcatctcgagtcgcgttaaagcgtccagcgcaccgagtggttcatcaagcaacaataaacctggtcgatgaatcagcgcccttgccagcgccacacgttgtttctgcccgccagaaagtgcggcaggccattcccccgcgcgattctccagtcctaccgcagccagagcctgacgcgccgcatcgcgccactggcctttaaggcctaacccaacgttatcaatcaccgatttccacggcagcagacgcgcgtcctgaaacatcattcgcgtatcatcctgaatctcagccagcggtgtggtgcccgctaacacgtcgcctgcggttggcgtttccagacctgccagcaggcgcagcagagtacttttgccaccgccgctgcggcccaccaccgccacaaactgacctgccggaatatgtaaatccagttggttcaggacgatattttccgcgtaatgtttgcttactgcattgagcaacaatggtgtgccctggttcagacgagccgtattcataccgtggcctccttcaaatgataagccgggttccagcgcaaccagagacgttctaacagctgcgcgctgacgtcagcaagtttgccgagcagggcgtaaagaataatagcgactaccaccacgtccgtttgcagaaactcccgcgcattcatcgccagataaccaatgccggaattggcagaaatagtttcggcaacgatcagcgtcagccacatcaggcccaacgcaaaacgcacaccgaccataattgagggcagggcaccaggcaggatcacatggataaacagcggtatgccggataatccatagctacgtgccatctccaccagcccacggtcgatattacggatgccatgccaggtgttgatataaatggggaatagcgtaccgagcgccaccagaaagatttttgcggattcatcaatgccaaaccacaaaatcaccagcgggatcagcgccagatgcggcacgttgcgcaacatctgaatggaggtatccagcagtcgctcaccccagcgtgacagcccgctaatcagccccagaattaatcccagcgatccgccaattgaaaaaccaatcagcgcacgccaggagctgatcgccagatgctgccacaattcgccgctggcagagagcgtccagaacgccatcaccactccttccggtgagggcaaaatacgcgtcgataaccagccaaccgaggaggccagttgccacaccgccacgatgcccaccggtaaaaaccagggggcaacgcgcaataaccacttcttcactggcgttgccatcatcgtgttccttagctttgcgcgacgttacgggggataaaatcattcgccaccgcttcgccttgtggattcagcggttgtggctggggaatttccgggatggcgacatccagatgtgggaacagtaactcgccgacccgatacgcttcttccagatgcgggtagcccgaaagcacaaaactgtcgatgccaagtgcagcgtattcgttgattcgcgcggcgaccgtaggaccatcgcccaccagcgccgtcccggcaccgccgcgcactaagccaacacccgcccataaattggggctgatctccagattgtcgcgcttgccgttatgtagcgccgccattcgctgttgtcctacggaatccgttcgggcgaatgcggcctgtgctttggcgatagtttcatcatcaagacgcgagattaaccgctcggcggcctgccacgcttcgtcgttggtttcacgaacaatcacatgcagacgaacaccgaaacgaattttgcgtccatgcgcggcagctttcgcccgcacgtgttcgattttctcttttaccagttccggtggttcgccccaggtaaggtagagatcaacttgttctgccgccagctcctgggcgacatctgacgatccgccaaagtaaagcggaggatacggctgttgaatcggcgggaagagcagtttggctccgcgtacatgaatatgtttgccgttgaaatccacagtctcgccaagcaacaaccgccgccagacctgggtaaattctgccgaggcttcgtaacgctcgctatgatcaaggaacacgccgtcgcctgccagttcttgtggatcgctgcctgtgaccaggttaaacaacgcacgtccgttagagagacggtcaagcgtggcggcctgacgggcggcaacggtaggtgaggttacgctggggcgcagggcgacaagaaacttcagccgttgtgtcaccgggatcatcgacgccgccaccagccacgcatcttcacacgatcgccccgtcgggatcagcacaccggtatagcccagacgatccgccgcttgcgcaatttgttgcagataaccgtgatcaaccggacgtgaaccttcttccgttcccagataatgcccgtcaccgtgggtcggtaaaaaccagaacatattcagactcataattgttttccttccagttgagtgggctgccagatgcgctggcgaatatcgacttttttcggcaccagacggttttcataaaacagatctgccgtttgctgctgtaaggcggcaacttcagcgctcaacggtttgatggtggtgggaggacgatgatccagatacgaggcaataaccggtgccggtaagcccatcgtttttgccagtaaagcgatgctttgttcgcgctggctgcgggttaacgcatcggcctcactaaaggttgtcagcacaccctgaataaaagcgccgtttttttctgcatacggacgagctgccagataaaacgatccagtttgattgagatcggtgccgtctttcagcacccgcacgccgccctgtaataatgcagcggagtagtagggatcccagatagcccaggcgtcaacgttaccttgctggaacgcggcgcgggcatcggcaggcgtcaggtaagtgggctgaatatccgtgaatttaagcccggcctggcgaagggctcgcagtaaaagattgtgcgaactggaacctttctgaaaggcaactttgtgacctttaagatcggctacggttttgatcgggctgttttctgccaccagaatcacttcggctttgggtttcggtggctcgacgcccacgtataccaaatcagccccggcagcctgggcaaagattggcggaatatccccggtactgccgagatcgatactgccaacgtttaacgcctccagcatctgtgggccagcggggaactccacccaggagatttttgtttgcggatagcgtttttccagtaactggtggctttttgccagcaccataccaatactgcctttttgatagcctatacgtaacgcctctggcgaagactccgcggcaacagcaagtgtagagacgctaagtaaacccgccagcgccagtttaatgatcttacgcatgggcattacctcgcagagacagaaggtcaggaacctgaacatcgcggcggtgcaacgcctgccagaaagtttctagcgcggtatcaagacgagtttgcagatttggcgtgaactggggtttgtgttggtaatcaattaattgcgagtcatcggcaaacacgccgtgcaggatctcctgggctttcagcgtacttaaaactggcttaagggcataatcgaccgccagcagatgggccacggtgccgcctgtcgccagcggcagcaccactttgccttgcaacgcacgttctggcagcaggtcgagcagggttttcagtgcaccggaataggcggctttatacacaggcgtggcgacaatcagcccatcggcctgttgcagctgttcggtgaaggtcttgagtgccggactatcgaaacgagcataaagcagatcttccgggacgaagttttgcaaattccagtgataaacctctacatccaggccatttagtttttcccgcgcatattccagcaaggagctggagcgagaaggaaagcgaggactacccgccagggtgatgacacgcatactctctccttataaccaattgttcttgttttgttaacattgataacaattcggtcagtctgacagagggcgtccgcgagtcgaaatgatttatctgaggaagaaaagccaaaaaaagcataaaaaaagcgcaataagaaaacgtttgctatttattgccgcaggtcaattcccttttggtccgaactcgcacataatacgcccccggtttgcacaccgggaatccaggagagttcatgtactaccccttcgttcgtaaagcccttttccagctcgatccagagcgcgctcatgagtttacttttcagcaattacgccgtattacaggaacgccgtttgaagcactggtgcggcagaaagtgcctgcgaaacctgttaactgcatgggcctgacgtttaaaaatccgcttggtctggcagccggtcttgataaagacggggagtgcattgacgcgttaggcgcgatgggatttggatccatcgagatcggtaccgtcacgccacgtccccagccaggtaatgacaagccgcgtctctttcgtctggtagatgccgaaggtttgatcaaccgtatgggctttaataatcttggcgttgataacctcgtagagaacgtaaaaaaagcccattatgacggcgttctgggtattaacatcggcaaaaataaagatacgccggtggagcagggtaaagatgactatctgatttgtatggaaaaaatctatgcctatgcgggatatatcgccatcaatatttcatcgccaaataccccaggattacgcacactgcaatatggtgaagcgctggatgatctcttaactgcgattaaaaataaacaaaatgatttgcaagtgatgcaccataaatatgtgccgatcgcagtgaagatcgcgccggatctttctgaagaagaattgatccaggttgccgatagtttagttcgccataatattgatggcgttattgcaaccaataccacactcgatcgttctctggttcagggaatgaaaaattgtgatcaaaccggtggcttaagtggtcgtccgcttcagttaaaaagcaccgaaattattcgccgcttgtcacaggaattaaacggacgcttgccgattattggtgttggcggcattgactcggttatcgctgcgcgtgaaaagattgctgcgggtgcctcactggtgcaaatttattctggttttatttttaaaggtccgccgctgattaaagaaatcgttacccatatctaattatttcttcaaattcctctttataagataatcagggctttattttcagccctggttgttttatattcatcgctgttgcttatttagacattttgtacttttattgttgaggttattaagcgaagcgacaatggattgtgtcgctgcggttttataaggttggggagtggcagatgcgaattaaaccagacgataactggcgttggtattacgatgaagagcacgatcgaatgatgctcgatttagccaatggtatgctatttcgctcacgttttgcgcgcaaaatgttgactccagatgccttttctcccgcaggtttttgcgttgatgacgccgcgctctatttctcttttgaagaaaagtgccgcgattttaatttatctaaagaacaaaaagccgaactggtgctgaatgcactggtagcaattcgttatctcaaaccgcaaatgccgaaaagctggcattttgtatctcatggtgaaatgtggatgcccatgccgggcgatgcggcctacgtttggttgagcgacactcatgagcaagtgaatttactggtcgttgaatctggcgagaatgccgcgctatgtctactggcacaaccctgcgttgttattgcgggtcgcgcgatgcagttgggcgacgccattaaaatcatgaacgacaggctgaaaccgcaggttaatgttgacagcttcagcctcgaacaggcagtctaacgcgccagcttaagcgcagtcttcggtacacaactacagcaaagaatagtgccatcatcgcctattgctgatttttttagcggcgtgacttcgccttctaaaagctgaacacggcaacttccacaaatgcccgcgcggcaagaataagggatacgaattccctgattttctaattgctccagcagcacctgttggttatttccacgaaatgcctgtccctgccagtcaatatctacgtttgcgtccggttgttgcgtggtgttggcagtatcatcagcggcacctgcgccgtaaattttagccggagccgttgccagaatttccacctcgtcgccaacgcgaatcacgccgctattacgggcaattaaattctgaccaaaatcgacatcgccgttatcctgggcagtacggaaagattgcagcgtttttaatggttcgcctgccggatgtttttgccctttttctgggctgacggtggtgaaaatacagcggctacaaggcttaaccacatcaaacacgacatcaccaatgcgaatcactttccagctatcttcttcccaggccgatgcaccggaaaccaccagattggggcggaattgctccatttttacactggccggacaacgttgttggagatcacgtaacgaggcctcgttagcaagaaggtaaggatagccatcagcaaatgacaggggtacagtgttgtggcgtttcacgcgccgggtcatttgtggccccacccagcgtaattgcacttcgcgggagaaaaatccacttagccatttgttgatcgcgtctggcgcaattcgcgcggtaaaatgtgtgccccaaacttcggttggtgcgtcttgtgtggcgaaatcagcaaaacgaacatatgcactactgccatctggtgcggtgagatgcaagccatcatgcacgggtgaaggagtaaaccgtaccattagcggaaactggcgagcggtaataaacgtaccgtcaggttccgtgatcataaagatgcgatcgaaggccagaccactgacatctgccagggtatgtgtaagaccaatgccgcgcatcgatttaacaggatgaataaaaagccgggttaatgtcgccacggtgcggtcctcaaatgaaaataagccctcaactttatgacatgacgcgcttattagctataatgcgcaacaattttcttagagtaaaagtgacaatatgaattctctgtttgccagtacggcccgtgggctggaagagctgttaaaaactgaactggaaaacctgggggccgttgaatgccaggtggttcagggtggggtccatttcaagggcgacacacggcttgtttaccagagcctgatgtggagccgcctggcctcgcgtattatgttgccgctgggcgagtgtaaggtttacagcgatttagacctctatctcggtgttcaggcgatcaactggacagagatgtttaatcctggcgcgaccttcgctgtccacttcagtggtttgaatgacaccatacgcaacagtcagtacggtgcgatgaaagtgaaagacgcgatcgtcgatgctttcacgcggaaaaatctgccgcgtccaaatgttgatcgcgatgcgccggatatccgcgttaacgtctggctgcataaagaaaccgccagtatcgcccttgatctcagtggtgatggtttacatctgcgtggctatcgcgatcgtgctggcattgcgccgatcaaagaaaccctggcagccgctattgtgatgcgatccggctggcagccaggaacaccgctgctcgatccaatgtgtggttcaggtacgttgctgattgaagcggctatgttggcgaccgaccgcgcaccgggcttgcaccgtgggcgttggggctttagcggctggacgcagcatgatgaagctatctggcaggaagtgaaagcggaagcgcaaactcgtgcccgtaaaggcctggcggagtatagctcccatttctacggttcggacagtgacgcacgggtgattcaacgtgcgcgcactaacgcccgtcttgcggggattggtgaactgatcacctttgaggtgaacgatgtcgcgcaactggccaatccgctgccgaaagggccgtacggtacagtgttgagcaacccgccatacggtgaacgtctggacagcgaaccggcgctgattgcgctgcatagtctgctgggccgaatcatgaaaaaccagttcggtggctggaatctctctttgtttagtgcctcgccggatctgctaagctgcctgcagctgcgtgcagacaaacagtacaaggcgaaaaacggcccgctggactgcgtacagaaaaactaccatgttgccgaaagcacaccagacagcaaaccggtaatggcagcggaagactacgccaaccgtctgcgtaagaacctcaaaaaattcgagaagtgggctcgccaggaaggaattgaatgttaccgcctgtatgacgccgatctgccggaatataacgttgccgttgaccgttatgccgactgggtggtggtgcaggagtatgcgccgccaaaaactattgatgcgcacaaagcgcgtcagcgtctgttcgatattatcgctgcaaccatttcggtactggggattgcgccaaacaaactggtgctgaaaacccgtgaacgccagaagggcaaaaatcaataccagaaactgggcgagaagggcgagtttctggaagttaccgaatataacgctcacttgtgggtgaacctgacggattacctcgataccggtctgttcctcgatcaccgtatcgcccgtcgtatgctcggtcagatgagcaaaggcaaagatttcctcaacctgttctcttataccggcagcgccaccgtgcatgcgggattaggcggtgcacgcagcaccaccaccgtggatatgtcgcgtacttatctggagtgggcagaacgcaacctgcgtctgaatggcctaaccgggcgtgcgcatcgcctgattcaggccgattgcctggcgtggctgcgtgaggcaaatgaacagtttgatctgatctttatcgatccgccaaccttctctaactcaaaacgaatggaagatgcgtttgatgttcagcgcgatcatctggcgctgatgaaagatttgaaacgtctgctgcgtgcaggtgggacgatcatgttctcgaacaacaaacgcggcttccgtatggatctcgacggcctggcgaaactgggactgaaagcacaagaaattacgcaaaaaacgctctcccaggatttcgcccgtaaccgccagatccacaactgctggctgattaccgcagcctgaaaggaatagtaatgtcattaatcagtatgcatggcgcatggctgtcgttcagcgacgcgccgcttctcgataacgcagaactgcatatcgaagataacgaacgtgtttgtctggtggggcgtaacggtgcaggcaaatcaacgttaatgaagatcctcaaccgtgaacaggggctggatgacggtcgcattatttatgagcaagatttgattgtagctcgtctgcaacaggatccgccgcgtaacgttgagggtagcgtttatgatttcgttgccgaaggcattgaagaacaagcggaatacctgaaacgctatcacgatatttcgcgcctggtgatgaacgacccgagcgagaaaaatctcaacgaactggcgaaggttcaggaacagctggatcaccacaacctgtggcagctggaaaaccgcatcaacgaagtgctggcgcaactgggattagatcctaatgttgcgctgtcgtcgctttccggcggctggttgcgtaaagcggcattaggacgcgcgctggtgagcaatccgcgcgtattgctgctcgacgaaccgactaaccacctggatattgaaaccatcgactggctggaagggttcctcaaaaccttcaatgggacaattattttcatttcccacgaccgttcgtttatccgcaatatggcgacgcgcattgttgatctcgatcgcggcaagctggtgacctatccagggaattacgaccagtacctgctggaaaaagaagaagccctgcgcgtggaagaattacaaaatgccgagttcgatcgcaaactggcgcaggaagaggtgtggatccgccaggggatcaaagcacgtcgtacccgtaatgaaggccgcgtacgcgccctgaaagcaatgcgtcgcgagcgtggtgaacgtcgcgaagtaatgggtaccgcaaagatgcaggtggaagaagccagccgctccggtaagatcgttttcgaaatggaggacgtttgctaccaggttgacggtaagcaactggtgaaagatttttctgcccaggttctacgcggcgacaaaattgccctgattggtccgaatgggtgcggcaaaaccacgctgctgaaactaatgctcggtcagcttcaggcggacagcgggcgtattcacgttggcaccaaactggaagtggcttatttcgatcagcaccgtgcggaactggatcccgataaaacggtgatggataaccttgctgaaggtaagcaagaggtgatggttaacggcaagccacgtcatgttttgggctatttgcaggacttcctgttccatccaaaacgggcgatgacgccggtacgtgcgctttctggcggtgagcgtaaccgcttgttgttggcgcgtttgttcctcaaaccaagcaacttattgattcttgacgaaccgaccaacgatcttgatgtcgaaacgctggaactgctggaagaactgatcgacagctatcagggcacggtattgctggttagccacgatcgtcagtttgtcgataacaccgttacagaatgctggatcttcgaaggcggcggtaaaattggtcgttatgtcggcggttatcatgatgcccgtggtcagcaagaacagtatgtggcgctcaaacagcctgcggtgaaaaaaagcgaagaagccgccgcgccaaaagcagaaactgtaaaacgcagcagtagcaaactaagctataaattgcagcgcgaactggagcagctaccgcaattgctcgaagatctggaggcgaagctggaagccctacagacgcaagtggcggatgcttccttcttcagtcagccccatgagcagacacaaaaagtgctcgccgatatggctgctgcagagcaggagctggagcaagcctttgaacgctgggagtatcttgaagcgttaaaaaatggtggctgatcgcaaaatagtcgatttaaacagagacagctgacaacggtaaaattgcctgatgaactgggtttatcaggcatgaaaaccaacactttgttcgtcatctgtaaaatagcgcatcattaaggagtaccaatgtgcgaacatcatcatgccgcgaagcacatcctgtgctcgcagtgtgacatgctggtggcgttaccgcgccttgagcatggtcagaaagcggcatgtccccggtgtggcacaacgttaaccgtggcgtgggatgcccctcggcagcgtcccaccgcctatgcgttggctgcactgttcatgctgttgctgtccaacttgtttccttttgtgaatatgaacgttgcaggagttaccagtgaaattacattactggaaattcccggcgtgcttttttctgaggactacgccagcctcggcacctttttcctgttgtttgtgcaactggttcccgcgttttgtctgataaccattctgttactggtgaatcgcgcggaattaccggtccgtttaaaagagcaactggcacgggtgctttttcaactcaaaacctggggaatggcggagattttcctcgcgggtgtgctggtcagtttcgtgaaactgatggcttacggcagcattggggtaggcagcagctttctcccctggtgtttattttgtgtcctgcaactgcgcgcttttcagtgtgttgatcgtcgctggttatgggacgacatcgccccgatgccagaactgcgccagccgctaaaaccaggtgtcacggggatacgtcaggggctgcgttcgtgctcctgttgtacggcaatccttcctgctgatgaacccgtgtgcccgcgttgtagtaccaaagggtacgttcggcgtagaaacagcctgcagtggacactcgcgctgcttgtaacgtccatcatgctgtatcttccggctaatattttgcccatcatggtgacggatttattaggctcgaagatgccgtcgacgattctcgctggggtcattctgttatggagcgaaggctcttatcccgtcgctgcggtgatttttctggccagtattatggtgccaacgttaaagatgatcgccattgcgtggctgtgttgggatgccaaaggacacggcaagcgcgacagtgaaagaatgcatttgatttatgaagttgttgagtttgtaggccgctggtcgatgattgacgttttcgttatcgcggtgctctcggcgctggtgcgtatgggaggtttaatgagtatttatccggcaatgggtgcattaatgtttgctttagtcgtcataatgacaatgttttctgctatgacgtttgacccgcgtttgtcgtgggatcgtcaacctgaatcagagcatgaggagtcctgacagtatggaatctaataatggggaagccaaaatccagaaagtgaagaactggtctcccgtgtggatatttcctatcgtcacggcgctcattggggcctgggttcttttttatcattacagccatcagggaccggaagtgaccctgatcaccgcgaatgcggaaggaattgaaggtggcaaaaccaccattaaaagccgtagcgttgacgtcggcgtggttgaaagcgccacactggctgatgatttgacgcacgttgaaatcaaagcgcggctgaattccggtatggaaaagttgctgcataaagataccgtcttttgggtggtgaaaccgcagattggtcgagaagggattagcggcctgggaacactgctgtctggggtttatatcgaactgcagccaggcgcgaaaggcagcaaaatggataaatacgatttgctggactcgccaccgttggccccacctgatgcgaaaggtatccgtgtgcttctcgatagcaaaaaagccgggcagctctcgccaggagatccggtgctgttccgtggctatcgggtaggttcggttgaaaccagcactttcgatacgcaaaaacgcaatatcagttatcaactgttcatcaatgcaccttatgaccgactggtgaccagcaatgttcgtttctggaaagatagtggcattgcggttgatctgacgtcagcgggaatgcgtgtggagatgggctcattgacaacgctgcttagtggcggtgtcagctttgatgtgccggaaggtctggatttagggcagccagtggcaccgaaaacagctttcgttttgtatgatgatcagaagagcattcaggattcgttgtacaccgatcacattgattatctgatgttctttaaagattcggtacgcggtctgcaaccgggagctccggtagaattccggggtattcgcctgggtaccgtaagcaaagtgccattctttgcgccgaatatgcgtcagacatttaacgatgattaccgtattccggtactgattcgtatcgagccagagcggctgaaaatgcagcttggcgaaaatgcggatgttgttgagcaccttggcgaattgttgaaacgtggtttacgcggatcgctgaaaaccggaaacctggtcactggcgcactgtatgttgatctcgatttctatccaaatacgcctgcaataaccggtattcgtgaatttaatggttatcagattatcccgaccgttagcggcggtctggcgcaaatccagcaacgactgatggaagcgttggataagatcaacaaactgccattgaatccgatgattgaacaggcaaccagtacgctttctgaaagtcagcgcacaatgaaaaacctgcaaacgacgctggatagcatgaacaagatccttgccagccagtcgatgcagcagttaccgacggatatgcagtcaacgttgcgtgaattgaatcgcagcatgcagggcttccagcctggttccgcagcctacaacaagatggtggcggatatgcagcgccttgatcaggtgttgcgagaactgcaaccggtgctgaaaacgctcaacgagaagagtaacgcgctggtatttgaagcgaagggcaaaaaagatccagagccgaagagggcgaaacaatgaaaaagtggctagtgacgattgcggcactgtggctggccggatgcagctccggcgaaattaataaaaactattaccagttacctgtggtgcagagcggtacacaaagcaccgccagccagggtaatcgcctgttatgggttgagcaggtcgctgttcctgactatctggcggggaatggtgtggtttatcaaaccagtgatgtgaagtatgtgattgccaacaacaacctgtgggccagcccgttggatcaacagttgcgcaacaccctggttgccaacctgagtacgcaactacccggctgggtggttgcctcccagcctctgggaagcgcccaggacacgctcaatgttaccgtcacggagtttaacggtcgctatgatggcaaggtcattgtcagtggtgagtggctgttgaaccaccagggacaactgatcaaacgtccgttccgtctggaaggaatgcaaactcaggatggttacgatgagatggttaaagtgctggccagtgtctggagtcaggaagccgcttctattgcgcaagagataaagcgtctaccttaatcataaagatttgtaaatataaccgcctccggtatgttgcctgaggcgtttttttgtttctaacgtgcggaaaaagttgttcctcttcacattttttgtacaaccgacatgcccgtgtagctcacaaatatgacagtggcgtgaattttgcgcattgacggcagttatgattcgcggtattgcttaactgtgattgcatatttagtaatcactgttttcttttccaccagaaaccagtatgagggaaacgaggcatgaagagacaaaaacgagatcgcctggaacgggcacatcaacgtggttatcaggccggcatcgccggacgctcaaaagaaatgtgtccctatcagacgctgaatcaaaggtcacaatggctgggaggctggcgagaagccatggcggacagggtagtaatggcctgattctgtctctttaaaaagaaacctccgcattgcggaggtttcgcctttatatactctgtctgattaaaatcagaatgcagacgtatcctggaacagaccgactttcaggtcgttggcggtatagatcaaacgaccatcaaccagcacttcgccatcagccaggcccataatcagacgacggttaactatgcgtttaaagtgaatacgataggtcacttttttcgccgtcggcagcacctggcctgtgaatttcacttcacctacgcccagcgcgcgacctttaccttcgccgcccagccagccgaggtagaaccctaccagctgccacattgcgtccaggcccaggcatcccggcataaccggatcgccgataaagtggcatccgaagaaccacagatccggattgatatccagctctgcttcaacataccctttgtcgaagttaccacccgtttcggtcattttgaccacacggtccatcatcagcatgtttggtgctggcaattgcgggcctttagcgccaaacagttcaccgcgaccagaggcaagaaggtcttcttttgtataggattcgcgtttatctaccatgttctctgtaagccttattttattgaagcacgcaggatagctaacacgtgtacgctgaacaagtccgatcagttcggaataaaccagttcagccaacgtaatggccatggaaaacggtgacgtccttcctgttgcgatgcttgtgcgatacgttcctggatggtttgcatcagcgtcgtttggccttcgccatcccacaccagatttaataataacggcagtgcgtcagtcacatcgtctactgcccagatggtgaatttgtcttcttctaccgctttcaccagttcactgtgaagacttaaatggcgaacgttagctgtggggataatgacaccttgtttccccgttaactcacgttgctggcaaatagcaaagaagccttcgattttctcatttaaaccaccgactggctgggcgcgaccgaactgatcgactgaacctgtgatagcgatactctgattcaccggcacatcggcgagggcgcttatcagggcgcagagttcagccatcgaggcactatcgccatccacttcactgtatgactgctcaaatgtcagcgatgctgagaaggggatctgttgctcaagctgtagttccgacatcaggaacgcttgcatgatcatcatccctttcgcatggatattgccgccaagctccgctttgcgttcgatgtcggtgaattcaccatcgccaatatgcacaacgcagctaatgcgagaaggttcgccaaaagcgcgtggatgacccggaaattcaatgaccgaaagggcgttaatttgcccgatgcgttcgccttcggtttcaatcaggatttgctcctgaaggatctcatcctgcatgcgttcagcgaggaaaccttcgcgccattcacgctgctgtagcattaagtttagctgctcgccggagaaggtgtcgccatcacacagggaggcgacctcttgacactggcggaggatccactgcgggctaagcggaagtgtttcttgttcaccagtgtagcgtgctgcttcgcggataagtaccggccaggcatccgctcccggtgctggtaagtgattatgtttggcggtaaatgtcacccagcgacaccactggcttactgactccgcatcgacaatctgcagagtatcttcaaattcgctataaatagtctgctctgaaagctctggctccatctcctggaaatcagccaatgattcgcgttcgcctaccagaatgactttcagcttcaatggcatcgaaggcacagagacggggagagggcgcgactcatcaaacgcaacccagtcaaaacgctcgcggttaacgatatttttcagccgcatccacagcagaggttgcgccagcagtgtacgcaaagagatgatgagaataccgccatttgcctgatgcaccagaccaggctgcagggtaatgtcgccattaaactgacgcaggcagccaaagagttgctctgcttctacccagtcggcagcgacaacttgcgttaaagtcgcaaaattatcatctgcactcactgcgtgacgtaagcggatggtgtggccggaaacctcatagtgaccgcccaccagttggcctgcatcgctttgtagcgtacgcgcggcatcagcaataagattcagatactcagactcttccggggccttcgccagcataaaagaggaggatgctcgcgtatgcagcaactgctccagcgcaaattgcagtcgcggttgagtatcactgaataaaggatcgttttcgtcaatcaaatgtggctgagcaaatatttcctgatagctatcggtatcaggaaccaggtcacgccatgcaagtttcgtaatggtcaaagttgatgttttttagtctgttgtcaaagccgcgattataccgtaaccggcactgcagcacacgtagaaagcaacgacaatactcctggcatgggcgttaaagctcacaggatggagattcttttcttcactggcctaaaaagctgatattctgtaaagagttacacggtaacattgagatcgctatgaaatatcaacaacttgaaaatcttgaaagcggttggaaatggaagtatctggtgaagaagcaccgcgaaggggagttaatcacccgttacatagaagccagtgccgcccaggaagccgtcgatgagttgctctcgctggaaaatgaacccgtgctggtaaatggttggattgacaagcatatgaatccggaactggtcaatcgcatgaagcagaccattcgggccagacggaagcgccattttaatgcagaacaccagcatacgcgcaaaaaatcgatcgatctggaatttatcgtctggcaacgtctggctggccttgcgcagcgtcgcggtaaaacgctttctgaaacgattgttcagctgattgaagatgcggaaaacaaagagaaatacgcgaataaaatgtcttctttgaagcaggatctgcaggcattgctgggtaaggaataactgtcaaaagtcagttcaatttactaaaggcgaaaaaaaaaccccgcagctgcggggtttttctaccagacgagaacttaagcctgcggctgagttacaacgtctttgatgcctttaacttcgatctctacgcgacgatccggagccaggcaatcgatcagtgcagcacgctgtttcacgttgtcacaggtgttgccagtaaccgggttggattcgcccataccacgtgcggagattttgtctgccgggatacctttagagatcaggtaatcaacaacggactgagcacgacgctcggacagagcctggttataagcgtcagaaccgatgcggtcagtgtaacccagaacaactacggaaccgtctttcggatccaggttgctcagctggctgtacagctgatccagagcagcctgaccttccggtttcagggttgctttgttgaaggtgaacagaacgtcagacttcagagtgaagtgcttggtctgtacttccggtgccggagctggagccggagcaactactggagctacttcgccctgaccgaaacggtaggaaacacccaggctcagcatgccgttgtccggacgagtgccgatggtgtgtgcgtcaccgatgttgttggtccactggtattccagacgggtagcgatttcaggagtgatcgcatactcaacaccgccagcgaagaccggagaaacgccggtgtcgtggtctttaaaggatgcgccaccaggtacgttagccttggtgtctgcacgccataccataccacccagacgagtgtagatgtccagatcgtcagtgattgggtaacccagtttagcggtcagctgaacgccctgagctttgtatgcgccgttgatgttgtcgcctttgtacggcatacgacctaaccagtcgtaacccatttcaaagccaacatacgggttaacctggtaaccaccaaaagcacctgcacccagttggttttcgtgggtcggaccattgttaggaataaaaccagtgtcatggtactgggaccagcccagtttagcaccagtgtaccaggtgttatctttcggagcggcctgcgctacggtagcgaaaccagccagtgccactgcaatcgcgatagctgtctttttcattttttgcgcctcgttatcatccaaaatacgccatgaatatctccaacgagataacacggttaaatccttcaccggggatctgctcaatattaactctaccgatatcttcggcttatgccgagcacccctggcgatgtaaagtctacaacgtagttgaaaacttacaagtgtgaactccgtcaggcatatgaaaaaaaagtcttgtataaggtacgtttaatcttttttgtcagcgacaatttacagaagaaaatcgcggaaaccgcttcagacaagcctccgcaaggaaaattagtcacgactgaaagcattggctgggcgacaaaaaaagttccaggattaatcctaaatttacttaatgatacaaattagagtgaatttttagcccggaaagttgtctcgttgcgtgagaggatgcgcttaccggacgcataataaaccccatagcgttaccttcatttgccgcatcaacaagttcagcatgctcttctgcagtcaaatcatctgccaaccaaccgatcaccacgctgtaattgcccgtgcgtaaagcgcgaaccattgactccacggtgtggcaaggggagagctggctaatctgcattactttcgttaagggtagcccagatgcctgaacccattcgcgactcagtttttgttgcggtgttaaccagagttgccagcgcgattgctgaccgagttgctgtaacaatggcaacagtagaagttgcgtcatcatgggctgatcttcgcgatagacaacttcactgataagcccggctgtagtgttttccgtagagacacgcgcaattttacttgctgcggatgagaacgacgaagaacgatgtgcatagcctgaagtgtacataatcaatccagcccctgtgagttactgtatgaatgtacagtacatccagtgacgacaaagatcaactctattttcggaaagagcctcgcaaattttgtcgttggtgacgggaaaacataaattaatcttgccccttaagaataagttgcctattttcgtagttaacggatccgttaatgtgaatcattcttttatgttatgattttaaaaggaattttatgaaaagcctctcctataagcggatctataaatcacaagaatacctggcaacgttgggcacaattgaataccgatcattgtttggtagttacagcctaaccgttgacgacacggtgtttgcgatggtttctgatggtgagttgtatcttcgggcttgtgagcaaagtgcaccgtactgtgtaaaacatccgcctgtctggctgacatataaaaagtgtggccgatccgttaccctcaattactatcgggttgatgaaagtctatggcgaaatcaactgaagctggtgcgtctgtcgaaatattctctcgatgcagcgctgaaagagaaaagcacgcgcaatattcgggaaagactgaaagatttgcccaatatgtcttttcatctggaagcgattctcggggaggtggggattaaggatgtacgggcgttacgtatacttggggcaaaaatgtgttggttgcgactgcggcagcaaaacagtctggtgacagaaaagattctgtttatgcttgaaggggccattatcggcattcatgaagctgcgctcccggtggcacgccgccaggagcttgcagaatgggctgactctcttacgccgaaacaggagtttcctgcggaacttgagtaatctggcgttgcagacgaccaatctctggcagtaatgcaatcaataacccaacttgttgtacgaccagaggttctttgctgtctgcccgtggttcaagttgctgcatccgctgtttcaggccagctaatgcctgattgacgcgttcttcatcagcaggttgatgatgtagcgcgtcatcaacatagcaaactgcgtcatcaagaaacgccagaatttcaggattagttaactgctcccggtgagcaccgagggctgagatatagctggtaaacgtatggttaaggcacagcaaccgaaacgcggcctcgcgaatttgcggggtaacgttcggctcgctggacatatttgataccaccgacgccagttcagcatcacggttgtgtgcatcgcggcgggcaatacgatacgccagacggttatcacgcccctgatggtattgctccagtatggcatcgagatagcgacagttggcctcggtggcacgttcgagcatgcgcggcagattgcgaaacttccagtcaggccagatgtagctcaccgccgcccacgcaatggcacaaccaatcagcgtatcgattacgcgaggtaacgccacttcaaaaccttcacccagcaagttaaaacaaagtagcaccaaaagtgtgatgaacatcgttgcatgggcgtattgcacgttacggaaggcaaaaaagagcacgccggtaataaccagtagcaccagttgcccttccagtgacggtacaaaccacagcacaggaatgccaattgcgatacctaccagcgtaccaataatccttaacttcaggcggtggcgcgtggcgttatagtttggctggcagacaaacaaacttgtcagcaagatccaatacccgtgatgcattccggttatctgaatgatggcgtagccgaagcacaacaccagcgacattcttaccgcatgacggaagagggcggattccggcgtgaagtgacggctaagacgcagccagatatcactcaatccgtgcgggctgtcatcagcgagctcattttcgtcattattatggggcagtgcctgggcctgttctgattcaattgttgccagttgggcatcaatggcacgtaaattgttcagtaaaaatcccagtgttttgagtaaatcagcaggagcgccgttatcgcgcatccgctccagcgcagcatcaatatgcgtaaaagcgcgctcaaaatgcggatcatgttgataaggctgacgcagcaaaatacagcgtgacagttgctggcacgcctggccctgcatcgacatcagccgctgaaaacggaacagcacgtcgctgtggcgaaaatgttcacgcaatgtttgatattgaatatgagaagagctggcacgctcgtgaatatcctgtgcgacaaagtaataatgcagtgtgcgacgcgttccccgttgaccacgatcgccacgtaagcgggtcagcagcgagagtttcgtctgattcaatgtcgccatcagctgaccgttggcgagagccaaatcgtacagcggtgcctggctttcatcttcaatatcaggatcaaacatgcgcgacttgagctcaagataacgcgccagttgttcatagcaacgcgccaggttgtcctgcagcgggcggaccgggaacagcagatgaccaataagtgtcaggacgttgtaccagacggcaccggccagaagatacatcggctgctgataccagtgctcatacagtgatgttcccaacatagtgtaaatggcgatcagcaatgcaccgaaggcaattgttgcatagcgttgacccagaccgccgagcaaaatgaagccgctggtagagagcgttaagccaatcgcaaatagccagggccagggaaacagcaattctactgaggccgaggcgataaaaaagcagaacagcgtaatgatgaggttacgcaaacgtcccgccagtcggtcatcgagatcggtcagcgccgctgccaccatcccaagcgtcagcggaatcgtcagttttacatcacccagccaccacggaaacgctgtggttccacaaagcgcaataaaaatacgcgcgtaatacagccaggcgctgttccaggtatagcgtttgagcaaaggacttagcataaaggccatattagtggattattggaaacgacgacgtgcattggcttcgcgcgcagcttgcgctgtttctaccgataccacgcgacgaccgaccggccatagtgcaatagcggcaattttaaagttcgcaataccgacaggaatgccaatgatggaaatacattgtgcgatgcccgttgcaatgtgcatcaggcataaccaccagccaaagaaaatcagccagaaaatattcaataccgtaccgccagtatttagcagcacatttttgccagccgggttcagttcatcgacatgaatagcttcattgccataaggcaccagagacagtttagtgatctcccagcaggatcgtgtcagcggtaaggtaaaaatcagcacaatactgaccagagtcgccaacagccagcccagagtggtggcaaatccgccaagcacaaagttcagaatgttcaaaacggtacgcataaaacctcgctttactgtggttttcagtaatgggcggcaattgtaacgtttttttgggctggagcacgttttctctgacggttacactgataagaaataatttcgtgtggatctacagagtcatggaactgaaagcgacaacgcttggaaaacgtctggcacagcacccttacgatcgggcggtgatcctcaatgccgggattaaagtctccggcgatcgccacgaataccttattcctttcaatcaattactggcgattcactgtaagcgcggtctggtatggggcgaactggagtttgtactgccggacgaaaaagtggtgcgtctgcacggtaccgaatggggcgagacgcagcgtttttaccatcatcttgatgctcactggcggcggtggagtggcgagatgagcgaaattgcgtctggcgttttacgtcagcaactggatttgattgccacgcgcaccggagaaaataaatggctgacgcgtgagcaaacctctggtatgcggcaacaaatccgccaggctttgtcggcgttaccattgccggttaaccgactggaagaattcgataactgccgtgaggcgtggcgtaaatgtcaggcctggttgaaagacattgaaggcgctcggttgcagcataatcaggcgtataccgaagccatgcttatcgagtatgcggattttttccgccaggtcgagtcttcaccgctgaatccggcgcaggcccgggcagtcgttaatggcgagcattctttgttagtgctggctggtgcaggaagcggaaaaacgtcggtgctggtggcccgtgcaggctggttgctggcgcgtggtgaagcgtcccctgagcaaattttattgctggcgtttggtcgcaaagccgctgaagagatggacgagcgtattcgagaacgactacataccgaagacattaccgcacgcacgtttcatgcgctggcgctgcatattattcagcagggcagcaaaaaagttccgatagtcagcaaactggaaaatgataccgctgcccgtcatgaactttttattgctgagtggcgcaagcaatgcagcgaaaagaaagcgcaggcgaagggctggcggcaatggctgacggaagaaatgcagtggtcagtgccagaaggtaatttctgggatgatgaaaaattacagcgtcgtcttgcctctcgcctcgatcgctgggtaagtctgatgcggatgcacggtggtgcacaggcagaaatgattgccagtgcacccgaagagattcgcgatctgttcagtaaacgtatcaagttgatggccccgttattaaaagcctggaaaggtgcgctgaaggcagaaaacgctgtcgatttttcgggccttattcaccaggcgattgtgattctggagaaaggtcgctttatcagcccgtggaagcatattctggttgatgaatttcaggatatctcgccgcagcgcgcagcgttgttagcggcattacgcaagcaaaacagtcagacgacgttgttcgccgttggtgatgactggcaggcgatttatcgcttcagcggtgcgcaaatgtcgctcaccaccgctttccatgaaaactttggtgaaggtgatcgctgcgatttagacacgacttaccgttttaacagtcgtatcggtgaggtggcaaaccggtttattcagcagaacccaggccagctgaaaaagccgctaaacagcttaaccaatggagacaaaaaagccgtcacgttattggatgagagccatcttgacgctttgctggataagctctctggttatgccaaaccggaagagcgcattctgatcctggcgcgttaccatcacatgaggcctgccagcctggaaaaagcggcaacacgctggccgaagttgcaaatcgactttatgaccattcatgccagcaaagggcaacaggcggattacgtcatcatcgttggcttgcaggaggggagtgatggttttccggctgcggcgcgggagtcgattatggaagaggcgctactgccaccggttgaggatttcccggacgctgaagaacggcggttaatgtacgtggcgctgacccgggcacgccatcgggtatgggcactgtttaacaaagagaatccctctccatttgtcgaaatactgaaaaatctggatgtgccggtggcgagaaaaccgtaagaaacaggtggcgtttgccacctgtgcaatattacttcagacggtccgcgagataacgctgataatcggggatcagaatatcgaccgcgtcgttgaaatgcggcgactggataatgaagtctgccgttgccacgttggtggcaaccggaatgttccataccgtcgccagacgcagcaaggctttcacgtcagggtcgtgcggcacggcgtttagtgggtcccagaagaaaatcaatacatcaattttcccttctgagatcaatgcgccaacctgctggtcaccccccattgggccactcaacatcgcgttgacgttcatgccggtcgcgcgggaaattaagttaccggtagtgcctgttgcatacagtacgtgttgttccagtaacggttgatgccgttccacccagctcatcagcatttgtttgcagtgatcgtgtgccaccagcgcaatatgtttccgcgaaggtaaagtgcgagtcgtcagttccataatgtacatccgtagttaactttcctacagattactgtaagtacttatcgctgcaagataaagactgaaaaagcctgcgcacaggcacaaaaatctcaggaggatggttgtttttccgcccattgcaggaaagtatttcgcgtttgtgggtcagccagtttaaaccaatacttcagccgttgttctgtgagcacctgagactgcggcggaatagcatccagctcggaaacacccgaaagcagcgtactgtcatctgccatcatcgtggcaaattgcggtagtgaagcgcgtttcgcggatttgttatagcgttcaacctcgacctcataatcaatcgtttttgcagttgaggtaatggcgagaatatccagctttaccggaatcggcgtcgcatcgccatccaacaattcaaggcgcggcgcggcatcaaaatggttagcttcccgctcattctccaggcgaggcaggcgaaaattgacctggttgatgagctgggtattaaaactaaccaccagtggaggggagatatagagccgttcttcactattggaaagatgaatcgtcttctcaacgcgaaacactaactgatgcggtccattgtccagttcaatgctgtccgcaccgcgcagcagagagctggaaaccttcttaccgtcgagtaccagaagatcgacatcagtagaaagccgcagcgtggtggcaaaaacggataccggcaaacataatgcaatcaaggtggtcacgatgccggttttcatagatagctcctgttaaaagaccgcccgaataataatgtgtcaaaatttttctttaatcatacttactaacatatagacatatttcccgcttttgctctcattcattcgtattagctgcatggttggcatgtcggctttgtcgtacactttgttaaacagtctggaggaaataatgaaagaaaccgatattgcaggcattttaacgtccactcacaccattgcgctggtgggggcaagcgacaaacccgatcgtcccagctatcgtgtgatgaaatatctactcgaccaggggtatcacgtcattccggtttcgccaaaagttgctggcaaaacactgctgggccagcaggggtatggcacgctggcagaagttcctgaaaaagtcgatatggtcgatgttttccggaattcagaagcggcgtggggcgtagcgcaggaagcgatcgccatcggcgcgaaaaccctctggatgcaactgggggtgattaatgagcaagcggcagtactggctcgggatgccggattaaatgtagtgatggatcgctgcccggctattgagatccctcgcctgggcctggccaaataaaaaatccccggaaggcaaaaaccttccggggatttgttcagggattagttacgcagacgcggggcctggagttgtttgcggatggtctgcgccagctcatccatggatggctgttcaggatgttcatcctgcaattcgctacttagctgggcttcagccaggtaggtatgaaccggtaggccgttatcatcctccatcaccacgtgataccacggagcggcgcgaagctcgtcattcaccgccagctcatcaggcgacggttcagagagcgaataaaccgggtcgatatccacgaccactccgagataacctaacagggaatggcggacctgctggccgataccgaatttgctggcaatcatagtcacctcccgggaaatctttacctttgatataagggtaaaattccacatttcaagttacatgacgcgacaggcaaaccctttcagatatagcccttccgggtaggtagcgatcaccggatgatcggctgcctgacggaactgctctataaattgtacatcacgaccggcatcaattgcggcatccgcgatgattttctgaaataaatcgctggtcatcagaccggaacaggagaaagtcaggagaataccgccttcattcagcaactgaatcgccagcatgttgatgtctttataaccacgacacgcgcccatcaactggcttttattctcaacaaacttcggcgggtccatcacgataacatcaaatttttcaccgcgatcgcgataagtacgcagcaatttaaagacatcatcacggacaaactctgccttgctcagatccagtttgttcagctcaacgttctgccgtgcaatatccagcgcttcgtgggaggtatcaacgctgacaacctggctgcaaccgcccatcaatgccgatacggcgaaaccaccggtataggaaaaacagttaagtacgcgtttattttcgacgtagcggcgggtagccaggcggctgtcacgctggtccaggtagtagcccgttttgtgtccgtgctgaatatccaccagcagtttcatgccgtgttcttcaatcggcagcagggcaggcggcaactcgccggtgatggggccctgagtcagctccatcccttcttttttacgtaccgcgacgtcgctgcgatcgtaaatagcacattccgggtacagcgtttgcagggcgctaattaatgccgcgcgctgatactctgcgccagcactcagcagttgcagcaccagaaaattaccgaaacgatcgatagtaatacccggcaggccatcagattctccggcgattaaacgatagctgtcgaggccatctttttgcgccagccagtcacgccatttttgtgcttgctgcaaacggcgggtaaaaaaagcaatgtcgatagactctgacgggtcaaacgtccagacgcgcgcccggatttgcgaagctggcgaataagcgccgcgtgctaaccattttccctgatgatcaacaatatcgatggtttcaccgaggctggctttaccttccatgcgggcaacggccccggaaaagacccacggatggcgacgaagtaatgatttttcgcgccctttggctaacactaaacgtacactcataatttacttttctgtcgatgcaaagaaatgggcgtcattgtccggagttttccatggatttgcaacgcgtccattaaggataaggagagcagcaatgtcgaaagtctgcataattgcctgggtttacgggcgagttcagggcgtaggattccgctacaccacgcagtacgaagcgaaaaaactgggactaaccgggtacgccaaaaatcttgacgatggcagcgtggaagtggttgcctgcggtgacgaagggcaggtggaaaaattaatgcagtggttaaaaagtggcggcccgcgttcagcgcgtgtggaacgggtgcttagcgagccgcatcatccctccggggagttaacggattttcgtatccgttaaatgcattttaccggtttaggcaggccagcaattttggtggcttgctttgccggacctttcgggaacagtcggtacagatagcggctattgcctttctcttcgccaaatttattcgccatcgcttttaccagcatacgaatcgccggagaagtattgaattccagatagaaatcacgcacaaaacgcaccacttcccagtgttctggcgacagcgcaatcccttcgttctctgcaatcaccaccgccagtggctcactccactggctgctttctttgagatagccttcggtatccgtttctatctctttaccttcgaagatcagcataattctttactaccttaatcagactggcggcagtgtaacaaaaaacaaagccccgcataaagcgaggctatgaaagtgttagcgggtgagattaatcgcggctggcgaagcccagaatgctcagcaggctgacgaagatgttgtacagcgaaacatacaggctaaccgtggcacgaatatagttcgtttcaccgccatgaatgatgttgctggtttcaaacaaaatagcgccagaggagatcagaatgaagaccgcgctgatcgccagatgcagggcaggcagctgcaggaagatattagcaaccataccaatcagcaccaccacaatacccgccatcagcataccgccaaggaacgacatatctttgcgggtggtcagcacatacgcagagcagcagaagaacaccaacgccgttccgcccagtgccatagcgattacgtcacccattccagcagacaggtaggtgttcagaattggtccgaggatatatcccagaaaaccggtaaaggcgaatgcggagataatcccggtcggcttattcgccgttttgtaggtcaggaacatcaaaccatacatacccaccagcgtcagaatcagacccggagatggcagcatcagcaccgtactggcagttgcggtaatcgccgaaaaggccagcgtcaggctcagcagaaaataggtattacgcagcaccttatgggtgctaagcagcgatgtacggtcatgtgaagaactaactatacgatccattgagtcactctctatgacagatgtaattaattaagcagcataatgataatgtgggaaggtacacagaagttttacccatctttacgcatttgatctggaacaggtttaacagcggattatcaggtcattaagcaaatataacgccctgagaatttcgacaggcaaaagaaaaaggggttagcatttagctaaccccttatcttatttggcggaagcgcagagattcgaactctggaaccctttcgggtcgccggttttcaagaccggtgccttcaaccgctcggccacacttccggaatgacgcgcactataaacatcccgatgcggcgtgtaaacccctaatttgtttgtttgcctgaaaaacagccaaaagtgcattgttagcgtgaaataacagcagattgatcatttcatcaccatgaattccttctcttttactcgtttagcaaccggttaaacatcctcaccgcccggcaaaaagaaaaataggtccatttttatcgctaaaagataaatccacacagtttgtattgttttgtgcaaaagtttcactacgctttattaacaatactttctggcgacgtgcgccagtgcagaaggatgagctttcgttttcagcatctcacgtgaagcgatggtttgccttgctacagggacgtcgcttgccgaccatgtgcgcccggtgtcctgccggtgtcgcaaggagaagagacgtgcgatatgaataacgaggaaacattttaccaggccatgcggcgtcagggcgttacccggcgcagctttctcaaatattgtagtctggctgccacgtcgctgggattaggcgcgggaatggcaccaaagattgcctgggcgctggagaataaaccgcgcattccggtggtatggatccacggtctggaatgcacctgctgtaccgaatcttttatccgctccgctcacccactggcgaaggacgtcatcctttccctgatttccctcgattacgacgatactttgatggctgccgccggaacccaggcggaagaagtctttgaagacatcatcacgcaatacaatggcaaatatatcctcgccgttgaaggtaatccgccgctgggcgagcaggggatgttctgtatcagcagcggtcgaccgtttattgagaaactcaaacgtgccgctgccggagccagtgcgattatcgcctggggaacctgcgcgtcctggggctgcgtgcaggccgcgcgacccaatccgacgcaggcaacgcctatcgacaaagtcatcaccgacaaacctattatcaaagtacctggctgcccgccgatcccggatgtgatgagcgccatcattacttacatggtgacctttgatcgcttgccagatgtcgacaggatgggccgtccgttgatgttctatggtcagcgtatccacgataaatgctatcgccgtgctcacttcgacgccggagagttcgtccagagttgggatgatgacgctgcccgcaaaggttactgcctgtacaaaatgggctgcaaagggcctaccacctataacgcctgttcctccacacgctggaacgatggcgtttccttcccgatccagtcaggtcacggctgcctgggttgtgcggaaaatggtttctgggatcgcggttcgttctacagccgcgtggtcgatattccacaaatgggtacccattccaccgccgacaccgtcggtttaaccgcgcttggcgtggtggcagcggctgttggtgtgcacgcagtcgccagcgccgttgaccagcgcagacgtcataaccagcaacctacagaaaccgaacatcagccaggcaatgaggataaacaggcatgagcactcagtacgaaactcagggatacaccatcaacaatgccggacgccgcctggtggtcgacccgattacgcgcattgaaggccacatgcgctgcgaagtgaatattaacgatcagaatgtgatcaccaatgccgtctcctgcggcaccatgtttcgcgggctggagatcatcctgcaagggcgtgacccgcgcgatgcgtgggcgttcgttgaacgtatctgcggcgtctgtactggcgtacacgccctggcttcggtttacgccatcgaagatgccatcggtattaaagtgccggacaacgccaatatcatccgcaacattatgctggcaacgctctggtgccacgatcatctggtgcacttctatcagcttgccgggatggactggatcgatgtgttagatgcgctgaaagccgacccgcggaaaacctccgaactggcgcaaagcctctcctcatggccgaaatcatcccctggctatttcttcgacgtacaaaaccgcctgaagaaattcgttgaaggcgggcagttggggatcttccgcaatggctactgggggcacccgcagtacaaactgccgccagaagccaacctgatgggctttgcccactatctcgaagctctcgatttccagcgtgaaattgtcaaaatccacgcggtctttggtggtaaaaacccgcatccaaactggattgtcggagggatgccttgcgccattaacattgacgaaagcggcgcagtcggggcggtcaatatggaacgcctgaacctggtgcagtcgatcattacccgtacggcggacttcattaacaacgtgatgatccccgacgccttagccatcggccagttcaacaaaccgtggagcgaaatcggcacgggtctttctgataaatgtgtcctcagctacggcgcattcccggatattgccaacgactttggcgagaaaagtctgctgatgcctggcggcgcggtgattaacggcgacttcaacaatgtgctgccagtggatttggttgatccgcagcaggtgcaggagtttgtcgaccacgcctggtatcgttatcccaacgatcaggtcgggcgtcatccgttcgatggcatcaccgatccgtggtacaaccccggcgatgtcaaaggcagcgataccaacattcagcagctgaatgaacaggaacgctactcgtggatcaaagcgccacgctggcgcggtaacgcgatggaagtggggccgctggcacgcacgttaatcgcttatcacaaaggcgatgctgcgaccgttgagtcggtcgatcgtatgatgtcggcgttgaaactgccgctttccggcatccagtcaacgttgggccgcattttgtgtcgcgcgtacgaagcgcagtgggccgcaggtaagttgcagtatttcttcgataagctgatgaccaacctgaaaaacggcaatcttgccaccgcttccacggaaaaatgggaaccagcaacctggccgacagagtgccgtggtgtcggttttaccgaagcgccgcgcggggcgttaggccactgggctgccattcgcgatggcaagattgatctctatcagtgcgtggtgccgaccacctggaacgccagcccgcgcgatcccaaagggcagattggcgcttatgaagcggcgctgatgaacaccaaaatggcgatccccgagcaaccgctggagatcctgcgtactctgcacagctttgacccgtgcctcgcctgttcaacacacgtgctgggcgatgacggtagcgagcttatctccgtgcaggtgcgttaacagcgaaggagaatcatcatgcaacagaaaagcgacaacgttgtcagtcactatgtctttgaagcacccgtgcggatatggcactggctgacagtgttatgcatggcggtgttgatggtcaccggttactttatcggcaagccgctaccttccgtcagcggcgaggcgacgtatctgttctatatgggctacatcaggttaattcacttcagtgccgggatgatttttaccgtggttttgctgatgcggatctactgggcttttgttggcaatcattactcccgcgagctgtttatcgtgccggtatggcgtaaaagctggtggcagggcgtgtggtatgaaatccgctggtatctgtttctggcaaaacgtccgagtgccgatataggccataaccccatcgcccaggcggcgatgttcggctatttcctgatgtcagtttttatgatcatcaccggctttgcgctgtacagcgaacacagccagtacgctatttttgcgccgttccgttatgtggtggaatttttctactggacgggtggcaactcaatggacattcacagctggcatcggctggggatgtggctgattggcgcgtttgtgatcggtcatgtctacatggcgctgcgtgaagacatcatgtccgacgacacggtgatctccactatggtcaacggctaccgtagccacaaatttggcaaaataagtaacaaggagcgttcatgagcgagcaacgcgtggtggtaatggggctgggcaacctgctgtgggccgatgaaggcttcggcgtgcgggtggcggaacggctgtatgcccattaccactggcccgaggatgtggagattgtcgatggcggcacccaaggactgaacttgctggggtatgtcgaaagcgccagtcatctgttgattctcgatgccattgattacgggctggaacccggaacgctacgaacgtatgccggagaacgcattccggcttatctcagcgcgaagaaaatgagcctgcaccagaacagtttctccgaagtgctggcgctggcagatatccgcggacatctgccagcacatattgccctcgtcggtttgcaacccgcgatgctcgacgactacggcggcagcctgagcgaactggcgcgggagcaactgcccgccgcggaacaggcggcgctggtacagctggcggcctggggaattgtgccgcaaccggctaatgaatcgcgctgtctcaattatgactgtctgtcgatggaaaattacgaaggcgttcgcttgcgtcagtacaggatgaggctggaggaacagggatgagcaacgacacaccatttaatgcgttgtggcaacgaatgctggcacgtggctggacgccggtcagtgaatgccgtcttgacgactggcttacgcaagcgccagacggcgtggtgttattaagcagcgatccgaaacgcacgccagaagtcagcgataacccggtaatgattggcgaattactgcgcgagtttcccgactatacatggcaggtagcgattgctgatcttgagcagagcgaagccatcggcgatcgctttggcgtctttcgctttcccgccacattagtgtttaccggcggaaactatcgcggcgtgctgaatggtattcacccgtgggcggaactgataaacctgatgcgcgggcttgtcgaaccgcaacaggagcgtgcttcatgagcgaaacttttttccatctgctggggccaggaacgcaaccgaacgatgacagtttcagcatgaatccactgccgatcacctgtcgggtgaatggtgaaccgagtatggctgccctggagcaatgtgctcacagcccgcaggtgattgcgctgttaaacgagttacaacatcaactaagcgaacgccagccgccgctgggtgaggtactggcagtcgatctgttaaatctcaacgccgacgatcgtcactttatcaatacgcttctcggggaaggggaagtgtcagtgcgcattcagcaggctaacgacagtgaaagtgaaattcaggaggcgatcttctgcggattatggcgggtgcgcagacgtcacggcgaacagttgctggaagacaaactggaggctggctgcgcaccgctggcgttgtggcaggcggcaacgcaaaacgtcttgccgacagattcgctgttaccgccgcccattgatggcctgatgaatggcctaccgttggcccatgaattactggcacatgtacgtaaccccgacgcgcagccgcacagcattaatctgactcaattacccatcagcgaagctgaccggctttttctctcacgtctctgtgggccgggaaatattcagattcgtaccattggctatggcgagagctatatcaacgccacggggttacgccatgtctggcatttacgctgtacggacaccttaaaaggcccgttactggaaagttatgaaatctgcccaataccggaagtggtgctggcagcgccagaagatttggtcgactctgcgcagcggcttagcgaggtatgccagtggctggcggagggggcaccgacgtaaaaagacggtaagtatcgctttcaggcttatgaatatcgcaatcggcgaatacctctggtcgtagagtttcaggataaagagggagatctaccattaacgggttatttttctctcttcgcctacaggagtgcgcatgtgggatgtcattgatttatcgcgctggcagtttgctctgaccgcgctgtatcactttttatttgtaccccttaccctggggctgatttttttgctggctatcatggaaaccatttacgtggtcaccggcaaaacaatctaccgcgatatgacgcgcttctggggtaagctcttcggtatcaactttgctcttggcgtggctaccggcctgaccatggagtttcagtttggtactaactggtcattctattccaactatgtgggcgatatttttggcgcaccgctggcgatggaagcattaatggccttcttcctcgaatccacctttgtcgggctgttcttcttcggctggcagcggctgaataaataccagcacctgctggtgacgtggctggtggcgttcggttcaaatctctctgcgttgtggatattgaatgccaacggttggatgcaacacccgactggtgcgcattttgatatcgacaccctgcgtatggagatgaccagtttcagcgagctggtctttaacccggtcagccaggtgaaatttgtgcacaccgtaatggcgggatacgtgaccggggccatgtttattatggcgatcagcgcctggtatttactgcgcggacgggagcgcgatgtcgcattacgctcgtttgccatcggttccgtcttcggtactctggcgattatcggtacgctgcaactcggagacagttctgcgtatgaagtcgcgcaagtacaaccggtaaaactggcggcgatggaaggtgagtggcaaacagaacctgcacctgcaccgttccatgtggttgcctggccggaacaggatcaagagcgtaacgcctttgccatcaaaattcccgcgctgctagggatcctcgccactcactcattagataaacccgtgccgggtctgaagaatttgatggctgaaacctacccacgcttgcaacgcggacgtatggcgtggctgttaatgcaggaaatatcgcaaggcaatcgtgagccgcatgtgttgcaggcattccgggagctggaaggcgacctgggttacggcatgttgctctcccgctatgcgccggatatgaatcatgtcacagccgcacagtaccaggcggcgatgcgtggcgcgatacctcaggttgcgccggtattctggagtttccgcatcatggtgggctgtggttccctgctgctactggtgatgctgattgcgcttgtccagacgctgcgtggcaaaatcgaccagcatcgctgggtgctgaaaatggcgctctggagtttgccgctgccgtggattgcgattgaagccggatggtttatgaccgagtttggtcgtcagccgtgggcgatacaagacatcttaccgacatactccgcgcactccgccttaaccacaggacaactggctttctcactgatcatgatcgtagggctttacaccctgttcttaatcgccgaagtctacctgatgcagaaatatgcccgtctggggccgagcgcgatgcagagtgaacaaccgacgcagcaacaggggtaaaggagaaaatcatgtttgattatgaaacattgcgcttcatctggtggctgctgattggcgtgatcctggtggtctttatgatctccgacggatttgacatggggatcggctgtctgctgccgctggtggcgcgtaatgatgatgaacgtcggatagtgataaacagcgttggcgcgcactgggaaggtaatcaggtctggttgatcctcgcaggtggggcattatttgccgcctggcccagagtgtatgcagcggcgttttccggcttttatgtggcgatgattctggtgctgtgctcgctgttcttccgcccgctggcctttgattatcgcggaaaaatcgccgatgcacgctggcgtaaaatgtgggatgccggactggtcatcggcagtctggtgccgccggtagtcttcggtattgcattcggcaacttgctgctcggcgtgccgtttgctttcacaccgcaattacgcgtggaatatctcggcagcttctggcaactgctgacgccattccctttattgtgtggattgctcagtcttgggatggtgattttgcaaggtggcgtctggttacaactgaaaactgttggtgtgattcatctgcgttcacagctggcgaccaaacgcgccgcactactggtgatgctgtgctttttgctggcgggttactggctgtgggttggtattgatggctttgtactgctcgcccaggatgctaacggtccttccaatccgttaatgaaactggtggcagtgctacctggtgcctggatgaataatttcgtcgaatcgcccgttttgtggatcttcccgctgctggggttcttctgcccattgctgacggtgatggcgatttctcgtggtcgcccgggttggggatttttgatggcgtcattgatgcaatttggcgtgattttcacggcaggcatcacgctgttcccctttgtcatgccgtcaagcgtgagtccgatctccagcctgacgttgtgggacagcacttccagtcagctgacgctgagcattatgttggtaatcgtgctgatatttttgcccattgtgttgctctacactctctggagctactacaaaatgtgggggcgcatgacgacagaaactctccgccgtaacgaaaacgagctgtactaaggagcaggaacaatgtggtatttactttggttcgtcggcattttgttgatgtgttcgctctccacccttgtgttggtatggctggacccgcgtctgaaaagttaacgaaggtaagcctgatgaggcgcattagcgtcgcatcaggcaatcaataatgtcggatatgaaaagcggaaacatatcgatgaaagcgatcttgatcccattcttatctcttctgattccgttaacaccgaaatctgcattcgctcagagtgagccggagctgaagctggaaagtgtggtgattgtcagtcgtcacggtgtgcgtgcaccaaccaaggccacgcaactgatgcaggatgtcaccccagacgcatggccaacctggccggtaaaactgggttggctgacaccgcgcggtggtgagttaatcgcttatctcggacattaccaacgccagcgtctggtagccgacggattgttgacgaaaaagggctgcccgcagcctggtcaggtcgcgattattgctgatgtcgacgagcgtacccgtaaaacaggcgaagccttcgccgccgggctggcacctgactgtgcaataaccgtacatacccaggcagatacctccagtcccgatccgttatttaatcctctaaaaactggcgtttgccaactggataacgcgaacgtgactgacgcgatcctcagcagggcaggagggtcaattgctgactttaccgggcatcggcaaacggcgtttcgtgaactggaacgggtgcttaatttcccgcaatcaaacttgtgccttaaccgtgagaaacaggacgaaagctgttcattaacgcaggcattaccatcggaactcaaggtgagcgccgacaatgtctcattaaccggtgcggtaagcctcgcatcaatgctgacggagatatttctcctgcaacaagcacagggaatgccggagccggggtggggaaggatcaccgattcacaccagtggaacaccttgctaagtctacataacgcgcagttttatttgctgcaacgcacaccagaggttgcccgcagtcgcgccaccccgttattggatttgatcatggcagcgttgacgccccatccatcgcaaaaacaggcgtatggtgtgacattacccacttcagtgctgtttattgccggacacgatactaatctggcaaatctcggcggcgcactggagctcaactggacacttccaggtcagccggataacacgccgccaggtggtgaactggtgtttgaacgctggcgtcggctcagcgataacagccagtggattcaggtttcgctggtcttccagactttacagcagatgcgtgataaaacgccgctgtcattaaatacgccgcccggagaggtgaaactgaccctggcaggatgtgaagagcgaaatgcgcagggcatgtgttcgttggcaggttttacgcaaatcgtgaatgaagcacgcataccggcgtgcgctctccatcaagataaataaacatttgccgctgttggtccacgcaggccatttacgcggcaaaattccacgcgtaatcctggtataagcacttctgcgtcgcggggagtgaatgcggaaatatggacctggacttctttacgaccgtcggaggggataatgaatcctttgccgcttttgcgatcaaaggttttgacaattcctgtcattttacgggacaaacaaattccttactgaaaatactgcgctgcactatacggggttaataaaataaagccagcgatatttaagaccgccggacggctaaaataaaatttgcttaatctcaattatcatgcgttaatagctgcgtcggtttgaaagacagacagcatacaaagtagtttactaaagcagttctcattatcaggcattatccccttcttttgagtctctctcctgaacactaagtagtttctgtattaaagccctgtttgccgaaaggcccaaaatgaaggaagtaaaatatgtctaataaaatgactggtttagtaaaatggtttaacgcagataaaggttttggctttatcactcctgatgatggcagcaaagacgttttcgtccatttcactgccatccagagcaatgaattccgcacgctgaacgaaaatcagaaagttgaattttctattgagcaggggcaacgtggtcccgcggcagcgaacgttgttacgctctaaggttgccgttattactcaacatctccatttccgctgtccatgttgccatggttcacagtaccgcacatcggcattcgatgtgacggagcgaaatcctttaggagcaaagtgcattttttgtaaatcgacgatgatcacctttgataacgtcgcgctgcaaatacgcactgaccatgcgccgctggatttcacaaaataatatcaggctccctcgtggagccttttttatatctgccttatttttcttcaacgctgtatgtatagtaagcgataacctgttgattattgaatctttcggggagatggcttataacatttcttacctgaccagggtaccgggaaccaacaccttactggcgtgttgctgtcttttaagaccagaagaggttaacagtgaatattgaagagttaaaaaaacaagccgaaacggaaatcgccgactttatcgcgcaaaaaatcgccgagctgaacaagaatacagggaaagaagtctctgaaattcgcttcaccgcacgagaaaaaatgaccgggcttgaaagttatgatgtcaaaatcaaaataatgtgattttgtgaacatcaccccgtgcgaggtgatgttccgcttgttgctaatttagtgaccaatcattggcgattgcggaattaagcgttggtacaattcctccggcaccgggctttgccatactcccgcatagattgcgtaaccaatcgccgcaaacataatccccataaccagtagcgtcattaaccagccagacaacgcaaaggcttttttatttgccgcaggtttttgcagtgaaaaggtcaatgttgaggctaccggacatgactctacgcaagtcatacagccggtacattccactgttcgtacctgaattaatttatcgaccgggatccgtgatgggcaactttttgcgcatttgccacaatcgatacaactttcggcattgcgacgaatcttaaacggcgataatagcgaaaccacgcccatcagcgcgccatatgggcaaagataacgacaccaggcatggcgaataaacaggctggcaatcagcaaaacgatcatgctgattaatgtcgcggtccccatatgacgaaagaaatcgagcattttaacgtccatcaccacgctgtagggcgacaacataaaatagtgaatcgcctgagcgggcatcaataacgcgatatagagaaaaaaactcaacagcaaatacttcacgccgcgcagaggaatatccagccagcggggaaggacaaattgccgaccaaacagtttgttaccgagatcgccgattaattccgaaagcgtaccaaccgggcataaccatgaacaaaaggcctttttgagtaatagactgatgacgataaaagcgaccaataacagcatcgcggcggcgtggacggacggtaactgacctgttgcaaggctatatttcagattcatcagaccggcaatcggtagccagccttcgatacctcccggtctggcgacaaatgtcgtactacctgccgtttcgtaatagcgcacccaataccagaacgtgatggcaatataaatattaattgccaacagtaataattgcgtcgctttacgccaggtcgtggcattgcgccagtcattccacggtaatttgccgcccgtcgtgcctggccgccgctgccagcgggttctttttttctctgccatgattttgccagtccgttaagttgcataccaaatgccactattctagttgttcttaactggctgatattgattcaaattgcgttcaggtctttcttattaaccatgcttccagagcggcaacactgcgtgtaatttcttcgtgtggaaggggggcagataatggctgctgctccagttgtgcgcattgctggctggcgctacgcattcccagactcgagcaactgctttttagctgatgtgcggcacgctttattttctcgttatcctgactggcgcgggcaatgtcgatttcatcgagaagcggcagggcatgttgtttaaataatatcagccattcgtggatcttctccgcccccattaaatgagcatcttcattgagttgcgatacatccagtggttgatcgttattgacttgcagttggagatagtgcgccagtaattgaccgagcacttcacgcggcaccggtttagggataatcccgcgaaatagcgagctggtacgctgtcgcagtgtttcgtcaatgacatgggcgctaaagccaatcaaaaccagtgacggatattgctgtgccagttgccgggcaagggtaatgccgtcgatatccggcagatcaaaatccaccagtgcggcagcaaacggttcgctattttgcaatgcctctattgcctgcgcggcatttcctactgcaacgacctgcgcaccactggtgttcagcatttcgacagtaattcgctgggtgagcgggttatcttcaattaacagcaaacgcaaatcgtccagacgtaccgcctgattgactgttttgggcacgggtgcagtggcaatacgtaacggcaagcgtaaacaaaaacagcttccaacctccggcgtgctggtggcgctcagttcgccacccatcgcctgggccagacggctactgatagtcagccccagcccggtgccgccgcgtttgccgctaacctgaacaaatggctggaagatttcagccagtttcgcgggatcaataccgcagccgctgtcttccacttcgaccagccattgttcgccatcagtgcgactacgcagaataatgtgcccttcgtcggtgaaacgcagggcgttgctcaacaggttggtaatgacctgacgaatacgccgcggatcgcccattaacgcagtcggtacatcgtcggcaatttctgttgccaggcgaatcgggcgacctttcacccttccgctcattaattgcagggtactttccagcagcgggcgcggttcaaagggttcatcgctgaccgaaacattcttgccgcctgcttcgatagccgaataatcgagaatatcgttgaggatggtcagcaacgattcaccagagtcggtaatcgcccgcaaatcatcgcgctgggcgttaagtgcggggttatctgccagcagttgcgcggtgccgagaataccgtacagcggtgtgcggatctcatggctcatcgccgccagaaacgccgattttgcctggctggctttttctgcttccgcccgtgcctgtcggtgttctatcaccagttcctgcaattcagctgtacgcgctttgacctgcgccgccagctgttcgcggtggcgattcagtgcatgaacactgctgcgaaacgcatccatcagccgcccgatggtgtccagttcccgcacgccagcggtttccgggaaaggggagtcgatatcaccatccagcaagcgttgcagcgcctgcgtttgttctgcaagagggcgcgtgactgagcgataaaccacgcgccagaggatcagaatcagtgcgcaaagagaaactaatcccagcaataacaggctgtattgcccgcgtgcactggctttttccagatgtgccagcccgtgctgattacgcagctcaatggtgtcgaccagctgactgacttcgctactaaactgcgcgaattgggcgatgttattttgggcgagagtttgcaggtgattgctgatttcactgtcctgctgatacagcgccagcaaatcgctatattggctaacggtagttaacgttgttgctacctgagtacgaacacccggatcttcaatgcgtatttgccgacgttgcagaattttcaccgcattattgagctgcttttccagcgttggcgcatttttctggatctgttccagccccagattcatcaccatttgctgcacccgcagggcgctaaggcgcagttcattcatctggttaacatactcaagatcgatatcaatcagccgatcgagtgcactttctgcggcctgacgctgatgttgttcgatcaaatcgtaaatcccggcctgggtcgctccggcggaggttgccgcattattcgcctgaccttgcgccaggcgtgcgatttcatcggcggcggcgactatctgctgactgagttgctgttgttgctggcgaagttgcaaacgctgccccaccagttccccttgctgacgtaacgaacgggagatctcctgctcctgttgttcaatagcggtggtgtcaaaaccttgttcccgtaacgcttgcagcaacgcattaatcttcaggctttgtgcggtgagcattcgcccctgcgcctgccacatcttttcgttatcggcactggtcaggttctgcgcggcgaaaagttcccaggcgctggcttcgctcaactggcgcgccatattcatggtaggaatcaatgcctgagtgttgtctttttccacctggctgataaagcgcaggttgtaccatcccaccagggtactggtcagggttaacagcgccatcagggcaaagcccatccagagtcttcgggtcagggttaaattcacggtcggtgcactttaggtgaaaaaggttgagtcgcaaagcagaatgcatctagcataaagccttattattgatgaggctatcatgcgcgtactgctatttttacttctttcccttttcatgttatcggcattttcggctgataacctgttgcgctggcatgatgcgcagcattacacggtgcaagcctctacgccgcttaaagccaaacgcgcatggaaactgtgcgcgctttatcccagcctgaaagattcatactggttatcgttgaactatggtatgcaggaggctgctcgccgctacggtgtggatttaaaagtgctggaggcaggcggctacagccagttggctacgcagcaagcacaaatcgaccagtgtaaacagtggggcgcagaggccattttgctcggtagtagcacgacgtcatttcccgatctgcaaaagcaggtagcaagtctgccggtgatcgaactggtgaatgctattgatgctccccacgtgaaaagccgcgttggtgtgccctggtttcagatgggctatcaaccaggacgatatctggtgcaatggagccacggtaaaccactgaacgtgctgttgatgcccggacccgataacgccgggggcagtaaggagatggtcgagggttttcgcgcagccattgccggaagcccggtacgtattgttgatattgcgcttggcgataacgatattgaaatccagcgtaacctgttgcaggagatgctggagcgccatccagaaatcgacgtcgttgccggaacggccattgcggcagaggcggcaatgggggaagggcgtaacctgaaaacaccgcttaccgtggtgtcgttttatctttcacatcaggtgtatcgcgggctgaagcggggaagagtgattatggctgccagcgatcaaatggtctggcagggggaactggcggttgagcaggccatcaggcaattacaggggcaatcggtgtctgataatgtcagcccaccgattttagttctgacgccgaaaaatgccgaccgcgaacatatccgccgctcgctgtcaccggggggatttcgtccggtctattattatcagcacacatcagcggctaagaaataaccttcgccatgttgtgtcaccagtaaatccgcgctgagtttatggcgtaaacgacgaattaacacatcgacggtgcgcaggtcagggttttccacccgacgcgcagaaagcatacgcagcagacgttcacggctgagaatttcgcccggattagtcacaaatgccaccagcatttcatactctgcgcgggtcagtttaatcggctcgccatcccgctccagcgtatggcgcgacacattcaggcaataaccggcaaagcgatagcagttgtcctgagtgtgcggttgcgcctgtcgcgcgaggtcgattcgccagagcaaatttttcactcgtaccaccagttcgcgcagctccagcggtttggtgacgtaatcgtctgcgcccatttccagcccaacaatacggtcaatccgatcgctgcgtccggtaaccagaataatccccaccgttgagcgttctcgcagggcgcgggttaacatcaggccattttcatcgggcaaattgatatccagcagaatcaaatccaccggctgattctgcataatttcccgcagcccggcaccgctcgccgtaacggaaacggtatacccctcctgagtgaagtaagattgtaatcgcgcctgggtaaccggctcatcttcaacaataacaatgtgatgtggcatcagagggttttactcattctgttcatatctgttcatattctgccgtaagccgttcatcctgaccagtgccgctgttcatatttgctcattaagatcgcttcactaaaccataattttacaggggctattatgcggaaactctggaacgcgttacgccgacccagtgctcgttggtcggtactggcgctggtcgctactgggattgtgattggcattgcgctgattgtattgccacacgttgggatcaaagtcaccagcacaaccgaattttgtgtcagttgccacagtatgcaaccggtgtatgaagaatataaacagtcggtgcatttccagaacgcctccggcgtgcgagctgaatgccatgactgtcatattccgccggatattccaggcatggtgaagcgcaaactggaagcgagcaacgacatttaccagacctttattgcccactccattgatacacctgagaaatttgaagccaaacgcgcggaacttgccgagcgtgaatgggcgcgaatgaaagaaaacaactcggcaacctgccgctcctgccataactacgatgcgatggatcatgcgaagcagcatcctgaagcggcgcgtcagatgaaggtggcagcgaaagataatcaatcttgcatcgactgtcataaaggtattgcccaccagttacctgatatgagtagtggcttccgtaagcagttcgatgagctgcgcgccagtgctaatgatagtggtgacacgctgtactccattgatattaagccgatttatgcggcgaaaggcgataaagaagcgtctggttctctgctgcctgcttcggaagtgaaagtccttaaacgtgacggcgactggctgcaaattgaaatcactggttggacggaaagtgcaggacgtcagcgtgtactcacccaattcccaggtaaacgcatctttgttgcctcgattcgtggtgatgtgcagcagcaggtgaaaacactggagaaaaccaccgttgccgacaccaataccgagtggagcaagttgcaggctactgcgtggatgaagaaaggcgacatggtgaacgatatcaaaccgatctgggcttatgcggattctctgtacaacggcacctgtaaccagtgccatggcgcaccggaaatctcccactttgacgctaacggttggatcggcacgctcaacggcatgattggctttaccagcctcgataaacgtgaagaacgcaccttgttgaaatatctgcaaatgaatgcgtctgacaccgcaggtaaggctcacggcgataagaaggaagaaaaataatgaacaataacgatctctttcaggcatcacgtcggcgttttctggcacaactcggcggcttaaccgtcgccgggatgctggggacgtcattgttaacgccgcgccgtgcgactgcggcgcaagcggcgactgaggctgtcatctcgaaagagggcattcttaccgggtcgcactggggggctatccgcgcgacggtgaaggatggtcgctttgtggcagcaaaaccgttcgaactggataaatatccgtcgaaaatgatcgccggattgccggatcatgtacacaacgcggcgcgtattcgttacccgatggtacgcgtggactggctgcgtaagcgccatctgagcgacacctcccagcgcggtgataaccgttttgtgcgcgtgagctgggatgaagccctcgacatgttctatgaagaactggaacgcgtacagaaaactcacgggccgagtgccttgctgaccgccagtggttggcaatcgacggggatgttccataacgcttcggggatgctggcgaaagctattgccttgcatggtaatagcgttggtacgggcggagattactctaccggtgctgcgcaggtgatcttgccgcgcgtggttggctcaatggaagtgtatgaacagcaaacctcctggccgctggtattgcagaatagcaaaaccattgtgctgtggggctccgatttgctgaaaaaccagcaggcgaactggtggtgcccggatcacgatgtttatgaatattacgagcagttgaaagcgaaagtcgccgccggtgaaattgaggtcatcagcatcgatccggttgttacatccacccatgagtatctggggcgcgagcatgtgaagcacattgcggttaacccgcaaactgacgtgccgctgcaactggcgctggcgcatacgctgtacagtgaaaacctgtacgacaaaaacttcctcgctaactactgtgtgggttttgagcagttcctgccgtatctgctgggtgagaaagacggtcagccgaaagatgccgcatgggcagaaaaactgaccggcattgatgccgaaaccattcgtgggctggcacggcagatggcggcgaacagaacgcagattattgctggctggtgcgtacagcgtatgcagcacggtgaacagtgggcgtggatgattgtcgttctggcggcgatgctggggcaaattggcctgccaggtggtggttttggttttggctggcactataacggcgcaggcacgccggggcgtaaaggcgttattttgagtggtttctccggctctacgtcgattccgcctgttcacgacaacagtgactacaaaggctacagcagcaccattccgattgcccgttttatcgatgcgatcctcgaaccggggaaagtgatcaactggaacggtaaatcggtaaaactgccgccgctgaaaatgtgtatttttgccggaactaacccgttccatcgccatcagcagatcaaccgcattattgaaggctggcgcaagctggaaacggttatcgccatagataaccagtggacctcaacctgccgctttgccgatatcgtgctgcctgcgaccacgcagtttgagcgtaacgatctcgaccagtacggcaaccactccaatcgtggcatcatcgccatgaaacaggtcgtgccgccgcagttcgaggcgcgcaacgactttgatattttccgcgagctgtgccgccgctttaatcgcgaagaagcctttaccgaagggctggacgagatgggctggctgaaacgcatctggcaggaaggtgtacaacaaggcaaaggacgcggcgttcatctgccagcgtttaatgacttctggaataacaaagagtacgtcgagtttgaccatccgcagatgtttgttcgccaccaggcattccgcgaagatccggatctcgaaccgctgggcacgccgagtggcctgattgagatctactcaaaaaccatcgccgacatgaactacgacgattgtcaggggcatccgatgtggtttgagaaaatcgaacgctcccacggtgggcctggctcgcagaagtatccgttgcatctgcaatctgtgcatccggatttccgacttcactcgcagttatgtgagtcggaaactctgcgtcagcaatataccgtagcgggtaaagagccagtatttattagcccgaaggatgccagcgcgcgcggtattcgtcacggtgatgtggtacgcgtctttaacgttcgtggtcaggtgttggctggagcagtggtttctgaccgttatgcacccggcgtggcgcgaattcacgaaggggcatggtacgatccggacaaaggcggcgagccaggggcgctgtgcaaatacggtaaccccaacgtgttgaccatcgacatcggtacttcgcagctggcgcaggcgaccagtgcgcacactacgctggtggaaattgagaagtacaacggaacagtggagcaggtgacggcgtttaacggccccgtggagatggtggcgcagtgcgaatatgttcccgcgtcgcaggtgaaatcatgaccacgctgacagcacaacagattgcctgtgtttacgcctggctggcgcagttgttctcccgtgaactggacgatgaacaactgacgcaaatcgccagtgcgcagatggctgaatggttttcgttgctgaaaagcgaacctccgctcactgcggcggtgaatgggctggaaaacagtattgccactctgacagtacgtgacgatgcccgtctggaactggccgctgacttttgcggcctgtttctgatgaccgacaaacaagcggcgctgccgtatgcatcggcctacaaacaggacgagcaagagattaaacgcttgttagttgaggcagggatggagaccagcggcaatttcaacgaaccggcagatcatctggcgatctatctcgagttgttgagtcatctgcatttttcgctgggagaggggaccgttcctgcgcgaagaatcgacggtttgcggcaaaaaacactgacggctctgcgggaatggttaccagagtttgctgcgcgttgtcgacagtatgaccgctttggtttttacgcggcactaagccagttattgctggtgttagtggagtgtgactaccaaaaaagataatgccgtttgtaggcctgataagacgcggcaggcgtcgcatcaggcattagtgcgcagttgccggatgcggcgagaacgccttatccggcctacgggaacagtgctttttgtgggcctgataagatgcgttaagcgtcgcatcaggcattatggcgcagttgccggatgcggcgagaacgccttatccggcctacgggaacagtgctttttgtgggcctgataagatgcgttaagcgtcgcatcaggcattatggcgcagttgccggatgcggcataaacgccttatccggcctacgggaacagtgctctttgtaggcctgataagacgcgttaagcgtcgcatcaggcaacaaactcacgggtgagccacaaaccgggaaagccgctggcgcagcaggcggttttcctgcttcaggtgcgcaatatcatccattaacgtcagcgccaccgcgatccccggccagtccagagccagttcatgacgcaggcgtaccgcgcgttgcaccacaatggcggcatggtcgtcaaatacccaggttgtctcctggatctcactcggttcaaccacccccaaaccgacaatttcattcaactcctcttcagagatgccggtatgcaggcaaaattcggtaatagtaaaagtcaccgtaacattagccattatgctttcccccaatctttacgtggatcaaaagacgactgggcgtctgccagttgctgccacagcgcggcagtgttttcatccggtttcggcggcatcacgattttcagtaccgcatacagatcgccggtctgttttttgctcaccagacctttgcctttaacgcgcaatcgttgcccggcctggctgccaggcgggatagtcagcaaaatgctttctttcagtgttggaacggtgactttagtacccagcgccgcttcccacgggctaaccggcaccactatttccagatcctggccgacaatatcaaacagcggatgtggcgcaatgtgaatcaccagccacaggtcgccatttggaccgccgttttcgcccggcgtcccctggcctttcaggcggatgcgttgaccattgccgacgcccgccgggatcttcacattcagcgttttcgggatttcctgttcgatcatgccaaaggcgttataaaccggcaggttatagctgatggtacgcttatgctcagtaagcgtttcttcgaggaaaaccgccacttcgatttcaatatcgtggccgcgtgtggcggggcgttgacggctctggcgggcatgctgaccgaaaattgacgagaagatatcgtcaaaatcttcggcgttaaaactctgaccgtcgccatgatggaactgacggttaaattgcggatcgttgcgatgttgccacatctgatcatactcagcgcgacgttgttcatcacttaacacttcccaggcttcagcgacctctttgaagcgggcttcggcatccggttctttgctgacatcaggatggtatttgcgggccagtcgacgataggcggtcttgattgtcttgagatcgtccgtcggtttcacgcccatgatggcgtaataatcctttaattccatagcgttatctcgcgtaaatcaacacaaattgaaggaacccctgtaaggtaactcctataagtgtagggtaatcctcaaaatttcatatgccaacacagaatatgttattgaaatcatcgcggaggggaggtcgcctcaaggtgggaggaacatattttatttacctcactcctgaacttttggctcatgcttacaagttaaacaataaggaaaggaatgcacaactcgactatttaaatcgttatgcaatttaatgataaagacatgtgctaaaaaccattgctattagtctcacattctttttttattggtaatggtaacgccgctgattttctttatagctactgatgtaatcattagcggcgtaaacgaggccggggctaatcaggcatagtttgcgtcaaaacttgcctgtttttaaaggggaatatagaaaaacaggcgttcaacgagccattttgcgaacctgttcccggaaaaatgacatatttctgtcacactctttaattattgataacaaaagaggtgtgaggaatgaacaaaacgctaatcgccgcaactgtggcagggatagttttactcgcttcaaatgctcaggcacaaaccgtaccggaaggctatcagctacagcaagtccttatgatgagccgtcataacttacgtgcgccgctggcgaacaatggcagtgtgctggagcagtcgacgccgaataaatggcctgaatgggacgtccccggtgggcagctcaccactaaagggggcgtgctcgaagtgtatatgggccattatatgcgtgaatggctggcagaacaggggatggtgaaatcaggggaatgcccgccaccggacaccgtttatgcctatgccaatagtctgcaacgcaccgtcgcgaccgcgcagttctttattactggcgcattccctgggtgtgatattcatgttcatcaccaggaaaaaatgggcactatggaccccacctttaacccagtgatcaccgatgattccgccgcattcagtgaacaggcggtggcggcaatggagaaagagctcagcaaactccagcttaccgacagctacaagctactggaacaaatcgttaactataaagattcccctgcctgtaaagagaagcaacaatgttcgcttgtagatggcaaaaatacctttagcgcgaagtatcaacaagaaccgggcgtttccgggccgctgaaagttggcaactcgctggtagatgcgtttactttgcaatactacgaaggttttccgatggatcaggttgcctggggagaaattaaatctgaccagcagtggaaggtgttgtcgaagctgaaaaacggttaccaggacagcctgtttacctcaccggaagtggcgcgcaatgttgcgaaaccgctggtcagttatatcgacaaagccctggtcaccgatcgcaccagtgcaccgaaaatcacggtattagttgggcacgactccaacattgcctctctgttaacggcgctggatttcaaaccgtatcagttgcatgaccagaacgaacgcacgccgattggcggcaaaatcgttttccagcgttggcatgacagcaaagccaatcgcgacctgatgaaaattgaatatgtgtaccagagtgcggaacagttacgtaatgccgatgcgttaaccctgcaggcacctgcgcagcgcgtgacgctggaattaagcggttgcccgatagatgccaacggtttttgcccaatggataagtttgatcgcgtattgaatgaagcggtgaaataacagaaaactcccccgcgtgaagcgggggagtcgctggttaaacgtttttacgttcgatggtctgttcgccccaaaaaagcgaatctttatcggtcttagcaaaggctttgactaacacttcatcgctaccttcttcccaaatcttttccgccattttttcgtcgtacccggcgacttcgaaaatggcctcggctatttccggcgacgtattgcgcagagatgcccattcaccgacgtgatgagctttcgcttcttgagttggcatgcgtatcctcctgttgaagattagccgttaagtttaactgccagacctgcgacatattccccttgataacgagcaatagacagttcttcctggctgggctggcgtgaaccgtcaccgcctgcgatggtggttgcgccgtacggcgtaccgccgcgaacctgtgaaacgtcaaataattcctgcgctgcgtagccaatggggacaatcaccatgccgtgatgcgcaagggtcgtccaggtggatgtgatggtttgttcctgaccgccgccagtaccggtggaactaaagacgctcgccagttttccgtatagtgcgccggaagcccacaggccgcccgtctggtcgaggaaggtacgcatttgaccggacatgttaccaaagcgggtaggtgtaccaaaaataatggcgtcgtaatcggccagttcttgcggggttgcaaccggtgcagtttgcgttttaccgcctgctttttcaaataattgcggcggcatggtttccggtacacgcttaacgacaacttctgcgccatccactttgcttgcaccctcagcaactgcgcgtgccatcgtttcaatatgtccgtacatggaataataaagcaccagaactttagccatttctaaccactcctcgtgttatctctattccgtagcgattcgctaccacttatttaaagataagacgtccttttcagagtgcaaatttcacaaccacttatttgatttataacaactttcacaagcacgtaattttgtcgcaaaatgacacatttttatctcatcgcgtttttttaatcataagagcggcttatggataattattggagatgatatctattctcgctaagaagctgttgcaggatattaccaaacgcgggtctgcccgcgtcagttcactaagcttagtcccacgtagcgaaaatatggcagccgccatacgccgcgttaattctatgcaatatgatgtctatacccagacggaggtcagtaatggcaaaccatcgaggcggttccggcaattttgcagaagaccgcgaaagagcatcagaagcaggtaaaaaaggtggacagcacagcgggggtaatttcaaaaatgacccgcagcgcgcatctgaagcaggtaaaaaaggtggcaagagcagtcacggtaaaagcgacaactagccgggctaatcaatgacgcatgcatttttgtctgtagctcgtcaaaacgccatcaccgccggttaccccggcggttttctgtttatggctcctgatgaacaacttctggcggtggaacgtcaaccaaccttctgcttaacaacgcattgagtaaaatcgcgccaaaggtggctgtaccgatccctcccaacgtaaaaccgcccagtgtgagagcaaaatcacccgcacccagcactaaggttactgcgaccataatcaaattaccgttctggcttaaatccacacggttttgtacccagatccgtgcgcctgcgacggcaatcagcccgaacacaacaattgatgcaccaccaatcaccgcggccggaatagtatggatcagcgcgccaaatttcggcgaaaagcccaacagcatggcgatgacggcagcggcaacaaacaccagcgtcgagtagacttttgtcacggccatcacaccaatattctcggcgtaggtggttacgccgctaccgccgacagagccagaaagcatcgtcgccagcccatcgcctacgaatgcccgccccatatacgggtccatattgcgtccggtcatcccggcgaccgccttgagatgacctaagttttccgccaccagaatcaccgccacgggcgcaatcagcatcattgcctgaccattaaaagcaggagtggaaaaatgtggcagaccgaaccaggcagcatggctgacgagagtaaaatcgacggcttttcccagccctaaaacgttggtcatcacgccatacagcagacaggcgacaattaatcctacgagaatcaataatcgctggatcatgccacgggtaaatacggccaccagcccaatacacagcaccgtcattaccgccatccagctatcaaaggccgaagccgatacatttttcactgcgataggcgctaagttcaggccaatcgccatcactaccgcacccgtcacaaccggcggcattagtcgttcaatccagcgcgtaccgattttcatcaccaccaggccaatgacggtataaaccagcccacaggcgataatcccgcccagcgcgatgctgatattcggattaattccctgaccattaaagcccgttgcggcaatcaccacgccgacaaaagccgcgctggaaccgagataactgggcacgcgcccgccggtaataaagaaaaacagtaacgtgccgatccccgacataaaaatggaaagattgggatccagccccatcagaatcggcattaacaccgtcgcgccaaacatcgccaccgcgtgttgaacgcccattactgccgtctgagcaaacggcaatcgttcatccggcgcgaccacgccgctctctgtagaggtcgattttaactgccagtgaggaaaaccgaacattgccatcagctgtctccttaaggaggttaacaagcagggcgcatcagcgcgtgataactgcgatcgaaccacaccagcccgtagggtgtggcgtgacgatgaatcgcttcgatggcgcaaaacaaaatgtcgtgggtgccgacgctcaccacctggctgatacggcagtcaaacgaaaccagtgcctcttccagttgcgggcatccggtcacaccagtctgccagcgggcggcggcaaagcggtgttccatgggcgttttgccgccaaaaaggtttgaaagcgactcctgcccggcgctaagtgtatttacacacagcgttcgattttcattgaataccggccagacggacgccccacgattcaggcacaccagtaatgtgggcggcgtgtcggtcacgctgcagacggcgctggcggtgaacccggcgcgcccggctggaccgtccgtagtgatgatattgaccgccgcgcccatacaggacatcgcatcgcgaaaggtttgttgatcgacaatgttcattgtttgctccttacaacagcccgcaggcttcttcaaaggacagacgtggcaggcgcgcaaaaagtttgctggaatcgccatagccgatattaatcagcagattgctcttcagcgtgctgcccgcaaaaaaggcgtcgtcaacgtattgacggtcaaagcccgacatcgggccggtatccagccccagcgcacggcaggcgacgatcagataggccgcctgcatggaactgttgcgaaacgctgtttcttcggcaagttgtggactggaggtaaaccaactgcgggcatcgccgtgaggaaacagctgtggtaaccgttcataaaattcactgtcccaggcgacgatagcggtgacgggcgcggtcagggttttttgcagattgccgctggaaagcgccgggcgcagacgttcttttccttctgcagtgcggataaacacgatccgtgtcggagaacagttagcagatgtcggcccccatttcatcagggcataaatctcccgtaacgtctcatcgctgacgggtgtctcccgccagccgttgtgagtgcgggcatcggtgaacagggtgctaagcgcacctgggctaacggcttcgttcatagcaattccttacagggcggcttcacggtgatgtaacaggctggcaagcccgttgagtaacagagcattaaacgtttcgggatcggtcacgttgcaggcgtgtccgccatagcgcatcaccattttctggctatcgggcagagcggcatgaagttcactggaacatgctgatggcaccagcagatcatcactggcgcagatgatttgcaccgggcagcggatacgatccgcatggcgactaaagtcagcgcgtttgagggcgttaagtcgacgcagtaaattatttttgccctgaaaatgcgccagtgccagcgcgccttctgcctcaaggcgaggtgcgcgggccgccatccagtcggcgggatagaggaacaacggctgcgcttccacccatgcctgcgcgccgccgctatgtagtaactgttcgcgaacctgaaaacagcggcgcgtatgggcgtttattcgtagccagccgttaacgctgaccagcacagttaccgacgcgggataatccagcgccagctgcattcccaccagcgcaccgagcgcatggccgaccaccgcgtaacgctcaatccctgcggctaccagcgcctgatgcagttccgctgccatctgggcgatactgtaatcttctgccagcgtgtcgggattattgccggtgccgcgctggtcgtaacagactacctgatactcctgatccagcaccgccagttgcggtaaccagtaactgccgctaccgccaagacccgaaatcaacaccactacgggcgcatcagcataagggggaggtgagagtgaaagtttcatcgcggtctcacttggcgatatgcgcaattgtggcgatttccaccagcgcgtcaggttttaccagtccgcactgaatgcagaatcgcgccggtttgtcacccgggaaaaactcggcgtagatttcgttaatcgcggcgtaatttttccagtcggtaataaagatgctgttgaaggtcacatccgccatcgtgccacccgccgtctcgatgaccttgcggatggtttccagaacgtggcgggtttgcgcctttgggtcatcggcaaacagcacgttgttatgttgatcaaaagccagcgtaccggagacatacaccacgccatcagccagcgtgccgggaacgaagggggccagcggtgcgctgctgccagcaggaataattacggattttggcatcgttaaactccttaagcgatacgagcaaaggacgtggaagaaagcgcgtcgcagaacgtttcgacgtcgctgacccagccaaaaaaggtttcgatattgaacaacgcggctttctgtgcaaattccggccccgcctggtgtgttgcgtcttccagcaccacgccgaaatactccagaaaaaagccgtcgcgtagcgtcgattcgacgcagacgttggtagcgataccggtgaaaaccagatggcgtattccacggctgcgcaaaatgctgtccagcggcgtattgaagaaaccgctgtagcgcggcttcggcagcacaatatcgccaggctgcggcaccagttcatccaccagttgataatcccaggagcctttcgccagcaatttcccctgcagctgcggctgattacgcatggttttcagggcgttcgatttatgaaaattcggtgagccggggccgccagcctcgacatactgttcatcccagccattttgaaaccagatgatcagcatccctgccgttcgcgctgcggtcacggcggtttgaatgttggcaatgaccgggcgagtggttgagacatcaaacccggcgagatctaagtagccgcctggcgtggcataggcattttgcatatccaccacgatcagcgcagtttgctgcggatcgaaggtaatggcttccggtcgtgcggttaaggttgtcatcatgccacctcctgagtcagcgcagggagatgggcgcggcacagcatcagtggttgaatgcgctcgccgaaggtttcgattcccgacagaaaatcatcgaaggtcaacagcacgccttcggcaccaggcacgtttgcgacttcatctaacatgcgcgcgacactggcgtaagaaccgactaacgtccccatattgatgtttaccgccgaagtgggatcggccatctgacggacgttggtgtcagtacctgagcgggtatctttctgactttgttcagttagccagcttaacgcctcttcatccgcgcccgctttgtagtgttcccattttgcacgagcggcatcgtcggtttcgtcggcaatcaccataaacaacacataagagccaacgtcgcgtccggtttgctctgcggcctgtttcatccgcgcagcggtcggggcgaaagccgtgggtgtatttacgcctttgccgaaacagaagttaaaatcggcataccgggcggagaacgccatgccagcgtcgctttgcccggcgcagatcactttcatggggacactcggttgcggactgacgcgacaatcatccatagtgaaaaaatcgcctttaaaatcgcttttccccgagccccacaggtcgcgcagcacctgaacatattcggtgagatagtcgtaacgacgggagaaatagtcatcgccaggccagatccccatctgctcatactcgggcttctgccagccagtcacgaggttgacgccaaaacgcccgccagagatggagtcgatggttgcggccatacgggcgacgattgccggaggtaacgttaaggtggcagctgtcgcgtatatctgaatgcgtgaggtgacggctgccagccccgccatcaaggtgaacgactcaaggttgtgatcccagaactcagttttgccgccaaagccacgcagtttgatcatcgacagggcgaaatcgaaatggtagtgctccgctttttgcacaatggctttattcagttcaaatgtcggcatgtactgcggcgcgtgggtcgaaatgagccagccgttgttgccaataggtacgaatacgccaattttcatcatcaacctctcttcgtctcgtaaagtgaaagtcagacggggcgctgcatcctgcatatccttttcagccgcgtaatggcttgtttgcaaagcggatgccagtttttaaaaagtgaatgttattaatgtgttaatgttaagttgtctaaaatgcctgaaaaaaagtggactaaacggtcaaaacagttgcacataaaacatgcattcgtgcgcgatgagagtgcagaaggtcgaggccgggcgggggttttgctatcctgttgccaatcaacaagaggggagagcgcatgacgcaaggcgcagtgaaaacaacgggtaagcgttcgcgcgcagtaagcgcgaagaaaaaagcgattcttagcgcagcactggacactttttcacaattcggttttcacggcacaaggctggagcagatcgcggagttggcgggtgtttcaaaaaccaatctgctgtattactttccgtcaaaagaggcgctgtatatagccgtactgcggcagattctcgatatctggctggcaccgttaaaagcgtttcgagaagatttcgccccgctggcggcgatcaaagaatacatccgtctgaagctggaagtttcccgcgattatccgcaggcttcgcgcctgttctgtatggagatgctggcaggtgcaccgctgttaatggatgaactgacgggcgatttgaaggcattaattgatgagaaatcggcgctcattgccggttgggttaaaagcggcaaactcgcgccgattgacccgcagcatttgatttttatgatttgggcttccactcaacattacgccgattttgcccctcaggtggaggcggtgacaggcgcgacgttgcgcgatgaggtgtttttcaatcaaacggttgaaaacgtgcagcggattattattgaggggattcgaccacgttaaagatgccggaggaggttgtaacatcctccggctacctgtttaaccgatcgtcattaaactggcgttaccgccagcagcagcggtattcacactcagcgaacgctcgatatacagccgttccagaaggatattgctttcgccacgggcaaaaccctgcaccgaaacaattgcaccatcccgcgcggcaacggcttcacacaatgcgcgaagctgatccgaatcaccgtggaagatcaccgcatcaaatggttgagcggttatattttccgctttcgccagttgaatacgttcgctgactgccgatggcaatgccttcactaactgacgatgtagcgcatcatccggccacagcatctggctacccactgccagcacggcggcgagctgagtcagcgcatcctgttcatcatccgcaatacacaacacgcgctcacgcggcagcagcgtccaggtgttgcgttcacccgtcggccctggcaacaatcgttgtgttcctgcctgcgccaactcgccatattgcgtacataacgcctgcaattctggacggtttgccgcccattcccgcagtgcatttagcggctgagtcaatgcggctttcaactgcgcatcgaccggatactccgcatcctgacgcgcgagcgtcactgccagtgcactttccgggcgattcgccagcagacggtagagatagagcggaccgcctgctttcggcccggtgccagacaacccttcgccgccgaacggttgcaccccaaccaccgcgcccaccatattacggttaacgtacagattaccgacctgggccgagccagtgacctgggcaatggtttcatcaatacgcgtatgaacgccaagcgtcagaccatagccggaagcgttaatctgctcgatcagctctgggagctggttacggttgtaacgcaccacatgcagcaccggaccaaagacctctttttgtaattcggcaaagtcatccagttcgatcagcgtcggagcgacaaaggtgccgctttgccattcacgggcatcttcgctgttttcccgcaccgcctggaacacctgacggcctttactacgcatggtctgaatatgacgctcgatattggctttcgcttcgctatcaatcaccggaccgatatcggtggtcaggcgacccggattacccatccggcattcggccattgcgccgcgcagcattttcagcgtgtggtcggcaatctcatcttgcaggcacagcacgcgcagtgccgaacaacgctgacctgcactgtcaaacgccgaggccagcacatctattacgacttgttcggtcagtgctgaagaatcgacaatcatcgcgttcatgccgccggtttcagcgatgagcggaatagggcgaccctgagcgtccaggcggctggcgatattgcgctgcagtaacgtagcgacttcggttgaaccggtaaacatcaccccgcgcacgcgatcatcacccgtcagttgcgcgcccacggtttcaccccgacctggcagcaattgcaccacgcctggcggtacacccgcttccagcaaaatggcgatcccttgcgcggcaatcagcggcgtttgttctgccggttttgccagcacgctgttacctgccgccagtgcggcagcgatctgtccggtgaaaatagccagcgggaagttccacggactgatacataccacaggccctaatggacggtgggtttcgttagcgaaatcatcccgcacctgtccggcatagtagtggagaaaatcgaccgcttcgcgcacttcggcaatggcgttactgaaggtttttccggcttcacgcaccagaataccaatcagttgctgcatctggctttccattagcacggcagcgcgatgcaaaatcgccgcgcgttcagccggaggagtggcaaaccagattggcgcgttattaaccgcactttccagcgcctgttctacttcacgcggcgtggcttcacgcacatagcccacaatatctttcggttccgcagggttaataacgggcgacatctcaccagccgcgaccggttgttccagcattggcaaggactgccatttttgcagtgcactattgagcagggctgaagagagcgaggccagacggtgttcgttagcgagatccagccctgccgagttgtcgcgcccgtgaccgtaaagatcgcgcggcaggggaattttcggatgcggtaatccagtttgcccttcctgttgcgccagtttttctacagcagtgactggatcggcgaccagttcatccagtggcaaagaggtgtcggcaatacggttaacaaacgaggtgttagcaccgttttccagcaggcggcgcaccagatatgccagcagcgtttcatgtgtaccgaccggagcataaatacgacacggacggttaagtttgccgtcggcaactttcccggtgacctgctcatacagtggctcgcccataccatgcaggcactggaactcgtactgacccgggtagtagttttgacccgccagttgataaattgccgccagcgtatgggcgttgtgcgtcgcgaactgcgggtagattagatttggcaccgccagcagttttttcgcacaggcaagataagaaacgtcggtatacaccttgcgggtataaaccggataaccttcaaggccgtccatctgtgcacgcttgatttcactatcccagtacgcgcctttcaccaggcgaatcatcagacggcgacggctgcgggtggcgagatcaatcaggtaatcgatcaccaacgggcagcgtttttgataagcctgaataacaaaaccgatgccgttccagcctgccagttcaggctcgaaacagagtttttccagcagatcgagggagatctccagacgatcggcctcttcggcatcgatgttaataccaatatcgtactgacgcgccagcagggtgagtgatttcagacgcgggtaaagctcttccattacccggtcatactgggcgcggctataacgcggatgtagcgccgacagcttgattgaaatgcccggaccttcatagatgccacgaccgttagacgctttaccaatggcgtgaatcgcctgctgataggaaaccatatacgcttgtgcatctgcggcagtcagtgcggcttcgcccagcatatcgtaagagtaacggaaacctttctcttccagtttgcgggcattggctaacgcttccgcgatggtttcgcccgtgacgaactgctcgcccatcaggcgcatcgccatatccacacctttgcggatcagcggttcaccgctcttaccgataatgcggttcagcgagcgggagaggctggcttcgttatgggtggaaaccagtttgccggtaaacagcagcccccaggtagcggcattaacaaacagggacgggctacgaccaatgtgtgactgccagttaccgttactgattttgtcgcgaattaacgcgtcacgggtggctttgtcgggaatacgcaacaacgcttccgccagacacatcagcgccacgccttcctgcgatgacaacgaaaactcctgcaataacccctgaaccatacctgcgcgaccactggcgtttttttgattacgcagtttatcggccagttgatacgccagtttgtgcgcctgttcagctactggctgcggcaggcgagcttgttccagcagcatagaaaccgcttcggtttccgggcggcgataggcggcggtgatggcggcgcgggaaaccgactggggcaatatttgctcggcaaagtcgaggaaaggctggtgtggttcctctgccggagtcggtgcttcatcgctctcattggccgcgccagaaagcagcgctggtagctccgggagagtatcgctgttttccagttgttcaagataagaaaaaatcgcctgtttaattaaccagtgtggtgtgcgatcgatacgtgtcgcggcagacttaatacgctcacgcgtcgcgtcgtccagcttaacccccatggtggtggttcccatgccattactcctgttgttctgaaaggtgcaacttaacgttatcgtgaaatatctatgatgttgcaactttgtgcaaccgtgttaaatgtgacctgcgtagcaagcttaaaaatgaatgaaatgttaataaacgaaatcgatatgacagggattaaaaaaataactcagactttttctctgcggcagttaacatttttgaaaggtgcaaccgcaaaaaatgtgagagagtgcaacctgatgaaaaatagtgtcgctgagcactaaaatttaatgtaaatggtgtgttaaatcgattgtgaataaccagcgcttccggcaggatacggtcgccctggtaaaacataaactctgttaccccgttccggtggcagatataacggcaagtttcgacattgccgataataattttttggagactttagatggctattagcacaccgatgttggtgacattttgtgtctatatctttggcatgatattgattgggtttatcgcctggcgatcaacgaaaaacttcgacgactatattctgggcggtcgtagtcttgggccattcgtgacggcattatcggcgggtgcgtcggatatgagcggctggctgttaatggggttgccaggcgctgtttttctttccgggatttccgaaagctggatcgccattggtctgacattaggcgcgtggatcaactggaagctggtggccgggcggttgcgtgtgcataccgaatacaacaataacgccttaacattgccggattatttcaccgggcgctttgaagataaaagccgcattttgcgcattatctccgcgctggttattttgctgttcttcaccatttattgcgcttcaggcattgtggcaggcgcgcgtctgtttgaaagtacctttggcatgagctacgaaacggctctgtgggcgggggctgcggcgacgatcctttacacctttattggcggtttcctcgcggtgagctggactgacactgtacaggccagtctgatgatttttgccctgatcctgacgccagttatcgtcattatcagtgtcggtggctttggtgactcgctggaagtaatcaaacaaaagagcattgaaaacgtggatatgctcaaagggttgaattttgtcgccattatctcgctgatgggttgggggctgggttacttcgggcagccgcacatcctggcgcgttttatggcggcagattctcaccacagcattgtccatgcgcgtcgtattagtatgacctggatgatcctctgcctggcaggggcggtggctgtcggcttctttggtatcgcttactttaacgagcacccggcggtagcaggtgcggtaaaccagaacgccgagcgcgtgtttattgaactggcacaaattctgtttaacccgtggattgccgggattttgctgtcggcgattctggcggcggtaatgtcaacgttaagttgccagctgctggtatgttccagtgcgattaccgaagatttatacaaagcgtttctgcgtaaacaggccagccagaaagagctggtgtgggtagggcgagtgatggtgctggtggtggcgctggtggcgattgcgctggcggcaaacccggaaaaccgcgtgctgggcttagtgagctacgcgtgggcaggctttggcgcagcgtttggtccggtggtgctgttctcggtgatgtggtcacgcatgacgcgcaacggtgcgctggcggggatgatcatcggtgcgctgacggttatcgtctggaaacagttcggctggctgggtctgtacgaaattattccgggctttatcttcggcagtatcgggattgtagtgtttagtttgctgggtaaagcgccatcagcggcgatgcaaaaacgctttgccgaggccgatgcgcactatcattcggctccgccgtcacggttgcaggaagggtaagggaaggcgttttaccgaaaatttcacgtcataaccggaagcaggcagagggcaatcagtgattgccctctgcgttttttctcaaaatatttttacatcttctcatcattatcactacattccacttgtatttttcttcatcgtaatgataatcgctatcactgcgatttacttttctttgcatagattgactcagaaaaacgtttaagggtggggggcatgtttgttccgtttctcattatattgcgcgaaggacttgaagccgcgctgattgtcagtttgattgccagctatcttaagcgtacccagcgaggccgatggattggtgtaatgtggattggcgtgttgcttgccgctgcgttgtgtctgggcttgggtatcttcattaacgaaaccaccggcgaatttccgcaaaaagaacaggaactgtttgaaggcattgtggcggtgatcgccgtggtgatccttacctggatggttttctggatgcgcaaagtgtcgcgcaacgtcaaagtacaactggagcaggcggtcgatagcgcattgcagcgtggaaatcatcatggctgggcgctggtgatgatggtcttttttgccgttgcaagggaagggctggagtcggtctttttcctgctggcggcatttcaacaagatgtcgggatctggccgccgctgggtgcaatgcttggtcttgctacagccgtggtgcttggcttcctgctctactggggcggtattcgcctcaatcttggtgcattttttaaatggaccagtctgtttattctcttcgtcgccgcagggctggcagctggtgccattcgcgcatttcatgaagccggattgtggaaccactttcaggaaatcgccttcgatatgagcgcggtgctctcaactcactcgctgtttggcacactgatggaagggatttttggctatcaggaagcaccgagcgtcagcgaagtcgccgtctggtttatttatctcatcccggcgctggtggcatttgttctgccaccacgcgcaggggcgactgcgtcccgctccatgtagcaaatacgacgcaaactcttgcttagttacaacatactttaaagggatagtctcgtcatgaccattaacttccgccgtaacgcattgcagttgagcgtggctgcgctgttctcttctgcttttatggctaacgccgctgatattccgcaagtcaaagtgaccgtgacggataagcagtgcgagccgatgatcattacggttaacgccgggaaaacacagttcattattcagaaccacagccagaaggcgctggagtgggagatcctcaaaggcgtgatggtggtggaagagcgggaaaatatcgcccctggttttagccagaaaatgacggcgaatttacagcctggcgaatacgatatgacctgcggtctgctgactaacccgaaagggaagttgatcgtcaaaggtgaagcaacggcggatgcggcgcaaagtgatgcgctgttaagtcttggtggtgcaattactgcatataaagcgtatgtcatggcggaaaccacgcaactggtgaccgacaccaaagcctttaccgacgctattaaagcaggcgatatcgaaaaagcgaaagcactgtatgcgccgacgcgccagcactatgagcgcattgaaccgattgctgaactgttctccgatctggatggcagcattgacgcccgtgaagatgattacgagcaaaaagccgccgatccaaaattcaccggtttccaccgtctggaaaaagcattgtttggcgataacaccaccaaagggatggataagtatgctgaccagctttataccgatgtggtcgatttgcaaaaacgcatcagtgaactggctttccctccttcaaaagtggtcggcggtgcagccggactgattgaggaagtggcggccagcaaaatcagcggtgaagaagatcgctacagccacaccgatctgtgggatttccaggctaacgttgaaggctcgcagaaaattgtcgatctgctgcgtccacaactacaaaaagcgaatccggaactgctggcaaaagtcgatgccaacttcaaaaaggtcgataccattctggcgaaataccgtactaaagacggttttgaaaattacgacaaactgaccgatgctgaccggaatgcactgaaaggaccgattactgcgctggcggaagatctggcgcaacttcgcggtgtgctggggctggactaagcgttatgcagtatgaagatgaaaacggcgtgaatgaaccgtcacgccgacgtttactgaaagggattggtgcgctggcgctggcgggaagttgtccggtcgctcatgcacaaaaaacgcaaagtgcgccgggtacgctttcaccggatgcacgcaatgagaaacagccgttttatggtgagcatcaggcagggatcctgacaccacaacaggctgcaatgatgctggtggcgtttgatgtgcttgccagcgataaagccgatcttgaacggttgtttcgcttgttgactcagcgttttgcttttctgactcagggcggagcggcaccagaaacgccaaatccgcgcctgccaccactcgattccggcattcttggcggctacattgcgcccgataatctcaccatcacgttatcggtgggtcactcattgtttgatgagcgctttggccttgcgccacagatgccaaaaaagttgcagaagatgacgcgtttccctaacgactcgctggatgcggcgttatgtcatggtgatgtgttgctacaaatttgcgccaacacccaggacacggtgatccatgcgctgcgcgatatcatcaaacacacgccggatttgctcagcgtgcgctggaagcgggaagggtttatttccgaccacgcagcgcgtagtaaaggcaaagagacgccgataaatttgctgggctttaaagacggcaccgccaatcccgatagccagaatgataagttgatgcaaaaagtggtgtgggtgacggcagatcagcaggagcctgcgtggacaatcggtggcagctatcaggcagtacgcttgattcagtttcgagtggaattttgggacagaacgccgctgaaagagcagcagacgatatttggtcgtgataagcaaaccggtgcgccgctgggcatgctgcatgagcatgatgttcccgattacgctagcgatccggaagggaaggtgattgcgctggacagccatatccggctggcgaatccccgcacggcggagagcgagtccagcctgatgctgcgtcgtggctacagttattcgttgggcgtcaccaattccgggcaactcgatatggggctactgtttgtctgctaccaacacgatctggaaaagggcttcctgacagtacaaaaaaggttgaatggcgaggcgctggaggaatatgtcaaacctatcggtggcggctatttctttgcgctgccgggtgtgaaggacgcgaacgattatctcggaagcgcattattgcgggtttaatgtttttaggcggataaggcgtttacgccgcaccaggcgttcgtacactgatgcgacgcttgcgcgtcttatcatgcctacaatcggtgcgggtcggtaggccggataaggcgttcacgccgcatccggcaagcttttaccagtactgcgaatcctgctgaaagcacacagcttttttcatcactgtcatcactctgtcatctttccagtagaaactaatgtcactgaaatggtgttttatagttaaatataagtgaatatattgttgcaatgaatgcgagatctgttgtaattattaagtagcagcggaagttcccggcagtgatagtcagtcactatggagatcgcggatggtaacgtcctgttctggacaatgttttgttaagcaacgctccaccacttgcggagatttctcctccggtagcaacttcgtcactctgtatttttctcacttcctctctttactcgtgttaccgacgccgcaaacggtgtgcgtagccgtttttcggcattttatccaaaagcaaactatggcttacaaggaagccaaccctctgatgttcgtgcgcataatcgcgctgccaacggcgcgtgtgatgaatacaaacaactcaaggtgctctccatgggaagacaaaaagcagtgatcaaagctcgtcgcgaggcaaaacgtgtgctgagacgggattcgcgcagccataagcagcgtgaagaagaatcggtcacctcgcttgtgcagatgagcggcgtagaagccattggtatggcccgcgacagtcgcgatacctcgcccatcctcgcgcgaaatgaagcgcaattgcactatctgaaggctattgagagtaagcagctgatattcgccacgggcgaagccgggtgcggaaaaacctggatcagcgcagcaaaagcggcagaggccctgatacataaggatgtcgacaggattatcgtcacccgtccagttctgcaagccgatgaagatcttggcttcttacctggagatatcgcagaaaagtttgctccctattttcgtccggtctacgacgtgctggtccggcgcttaggggcttcctttatgcagtactgcctgcgaccggaaatagggaaggtggaaattgcgccgttcgcctatatgcgtggacgtacctttgaaaatgcagtcgtcattcttgacgaggcgcagaatgtgactgccgcgcaaatgaaaatgtttttaacccgcctcggggagaacgtgacggttatcgtcaacggtgatatcacgcaatgcgatttgcctcgcggcgtgcgctccggattaagtgacgcgctggaacgtttcgaagaagatgaaatggtcgggatcgtccgattcggtaaagaggattgcgtacgttcggcactttgccaacgtacgctacatgcatacagttaagtgtattatcggcgcagagcccgggcgaaccgggctttgttttgggtgtttacgcccggactagcgctttttctgaaaccaccatttttatttgcccctggctggtgaagtgtacgctcatcctgtggcttttttgtagttgctgatagagctcatcaggtattgctaagctctcagcatattcttgcggcgtatattggtaggctgcatgatgctgctgtttttgaaaacgtagcttattgtacagcgcccagacaattaacacgacggcattcgccactgccagcaaaaaatagaactgaagtcggcttctggcctcgctttgccagtaataacccgtcagcagatccattgcgaataagaatatgaacaaagcaaataatgtccataagatggttgtggcaacataatcaaccattaaacgtactggcgattgtcgggtcgtaataattaaattgttcatattaacctctcagaatcccgcgatcgggacttacccaacgggcgcgttgctttttaggcatcaacatgactcgtgtaaatgataccaatgtcgttgccagactcagcatccagaaaataaccgggaaccaaataatccagaaaagcgatgaagtcagattatgctcatagcgattctcgatcatcaggctgacaataaattgcagtaaacataacgtacacaataatattccggcagtatgtgtcgcagcgatatgtgtcaattcaatatttaacggtacaccggcaagttggactgcgtaaataatgaaaccgaccaggcaagtgaaggcccatattgtcgtcaggcagtattcaaaaaacagcggccacattcgaaagttttctttgcgccacaaccttgtcatatttttgaggaatacttctgcaccgccctgagcccagcgcaggcgctgtttccacagcccttttaacgtttcaggcattaatatccagcacagcgcccgtggctcgtaaaaaatcgcccactgattcaactgcagcttccagctaatatcaatatcttcggtgatcatatcgtcactccagtaacccacttctgccagggcgctgcgacgaaatgcggcaataacaccggaaacggtaaatacgtttccatagatacgctgggttcgcttgatcaaaccaataattgaggaatactcgccaacctgaattttacccaccagggtagaacgtgttcgaatacgaggattaccggttacggcacccacacgcgggttgtacaacatcggttccacaatatatgccgccgcatcgcggtctaataacgcatcgccatcaatgcacaccagatattcacttttcgccgcggcagctccggttttaagcgcaatggctttcccctggttttgcgccagatgaatgacccgcaggtggggaatttgtgcagccatgcgatccaggatggcacgggttttgtctgttgaaccgtcatttacggcaataacttcaatgttctcataacgctgtgctaaagcggcgtgtatggtttcctcaacgtttttctcctcattaaaacagggaatgataatggagatagacggattatctttcaactggggggctggtgcgttttctccccacggccagtggcgttcacgatagacccagaaatagacgccgccaacaatccacataatagacataaaaaacggccagaagaaaacgaacctcatcatcagttcaccagagtgaaagtacgctacgcatagggggatgcataacaccagacataatataaaaaacgatacgatgcgattaatcatttttcggataccaggctgttgaaaactcaggacgaataacgtctatttcaggttggttatgcagaaaattgtcgggataataaccatagtttttccctccattcagttgtaataggctcatccagtgagcgagttgttgcgaagaaatagcctgatgctgaccatttttctgccagttttgtgcctgtaattctaaaatagatttgtctttagcctgagggatgtttttaatttgattggtcaattgtattaaccattggtcagccgatttttctgcgacaccttccatataaggcatagccataatagcggtccagtcatagctttttaggaaatcagcataattctgtgcaaaccacgcttcactttcaggttgtattaccggaagtgcaaaaatatttcgtgcagttttaacatgtggaccgcgaatggcttttacgcgcgcactaagttctaaagtgaagtcagttaacgcacgacttttaaagcgggtccactgtttaaattgctccgggttttgtcgaatttcgctcagactcccgctaaagcctgcttgctgataagccgtgatagccggtgcactggcatcttcataatctgaaagcaaagcatcatcgtggaacaatatgccatcaaaagcagcatgtccggcaagatcttcatataacatgccaacttgtgctctgactctgtcatcgaaaggagagagacggcgatattgttcaggatgaatttgtgcttttttctccccagtcggtaagtattttactcgcgttaatgtgggatctaaatcccagcttaataccggcatccacgcatagatgtttacacctgagcgggtacgtaattgccaggcaacccgactaaaaatatctgctttcattggtagcaaacgatttggaaaccagacctctttgaccagcccatcaccatcgggatcagcaaatgcctgcaaatacacggttgatatttgcatatctttcacccgctgaattagcacatcaatattgcgatccatttgctggtggttttcgtcataaacgtaatcaagatcgatatgcattatccgttgtggtgatttttcctgtacggtaataatttgctgggcaaactcttttaatgagggattattggcgattaatactcgcggaatggaatccaattgtgacgcatttgccaaacctgattcaagggtgaagaacatgtcataaccgagtttttttaattcctctatcgctatgccattcgcttcgccataaggccaaacaaaaacgtgtggatttaccttagcctttgtacgcaggtattccgtcatttttacagcatccagacgaattctttcccggtattctgctgcggtttcataccgtgcgtggtcagtaaaatatgcacgatttacatatacaggcaataagctgccggtggcattagcctgaataccgtagtgagaattccatgtatgagaagcgacctcaacgagccgggaacgcgcaacttctcgcacttgttgccacgtggcaaaatattctcgatcgaccatctcatcgccaaattttacttgttcatccgctggcgtatcgacccaactgccgacgggggcccatacagcaggccactggaaggcctgaagaattgggaagacgcgggtataaaaactctggtagccgtcatcaaaagtcagcactactgctttttccggtagcggttttcctcctcgatgtgcttcacgaatttgagcaatactgaccggttgataaccgttctcgcgcagccaggcaaattgttcacgcagtgctgatgtccgcactgacataaaacgctggtcggcagcttcgtcttcaacgttatgccatgaaatcgccacaaaaccattatgcggccacggttgctcggcgagtaaagattcgcgatcctgtggcggtataaatgatgttcttgactggctaatgcacgcagtgagcataattatactcaccagcatcaggatatatttatttccattacgtaacatatttatccttaaaatctgaatgtcatatcgaattcaacgtataagttgtgttctctgtcaccgtcataaggtcgtttttcccagcgtagcgttgcgccagcatcaatcacgtcattccagctaatacgttgcccgtagccgagttgggtgacgacatccgtgccataatgtttttgccaggaggcaccaacacctgcgctgaagatttgctcccagctattttcatagcttcgccataacaaatgacttgcctcaaatgccggaacaatatcgaacgtttttatagggttgtagtatggagtgtcgtgttctgtattttgttcgtaatacagattgggtaggaaatcgacaatcaaatatggtgaagaccagatgcgttcctgaccctcaagtgagacttcctgacgctggttactgtcggaaaaatcagtgaaagcccaggagacaccgtacttacgccgctcattttgataccagcgaacataagcctgagcactgttgcctgtaacaccatttttcattgcccgtaatggaacgcggtgagagaggcgttccagttgcgaaccaatacgccagttatcattaaaatcataccagccagacaggcgcgcgccgggtttatgctcatgattgaaaacgcgttcagcgtactccgcctcgagccagatattacgtgaccgccactcaacacccgccagccagtcgcgaacaatcccttttccttcgctaaattgtccatcggcataaccgaatccagcaaaaccgcgccagttatccttcagcggtggtgaataaacgatggtggttaagtcgacatcatgtttaccactatccgggccttcggcatcaattcctgttgaaccagctatacgaagctctgcaagattatgtacatcaaccgcacgttttaaacgtacaacgccgggatcttgcggttcacgttcgacaacatcgtgcgttaagacagctgcctgctgccattcttgtaacgttaatgctgtccatgcttgttcaacctccagattaatattacgtggctcgatcacttctgctttttttaattcattttctgctgcacgatgccaaccgcgggcttgtaacacactcgcgtaatcaatgcgcagtccctgatttcctggtgcgttataagcaagctctctggctatcatttcagcctgaggaagatcattactatattttgctacggttgagagaaacgaatgcccctgtaaccaggtatcattcgggatgctcgtaggcgtgcccattaaccgaaggaaaggcggcgaagtattaatggtatgttgggtgacagttagcgcgccgggataattttcactctccaggtggctgtaaaagagatccgcaagttcttcatcggataaatccggggcaatggtctccttgtgataaaagagctctgtcattattgactgtgctttttttggctgctgttctttgagataagccgacgcaacccaatattgcgcccagggcggaataatttgcctcgtattttttaaacgctgatagtgagaaataacgtctttataacgatcgcgagttaataacgcgccaagatgatcaacctgaatacgctggtactgggcagtgcggtctgagttatcatgccacagaatttctaatgcagcgtattgggcgagggcgcgatcggcaatggcataacgttcactttcactgcgcgtaggcataaacgacagtctgaccagttcggcatgaatatcagcgcgaatatctggcgttaaattggcatcgtcaatcgcggcagcaagttgattattccgtaatgcctgcacgtattctgtgggatattgttgcgttaaggcattttcaggtaatgaccctgtcatcgcccgtaattcatcctcatgccgccccgccagtttatagatataggcttctgcgagtaaattagctttgtccggtgctccagagttaagctgcttaagtttaaccagcgcagaatcatagtgacccgcatctgccagggttaaaatttgtccccgttgataatccttattttgcgactccagagagagtgccttttgccacagtgtaagcgagttttgccattgttgcaggttacgataagcgacggcgacagctgcataaccacgcgctggtaattgctgatgacggtagcggttgtaaacggtaataacctgtttatcttgcccggcccataaggcaatctgtaaccagtcagcaatttggttattactgagtgctgatttttgtgcaaaccataacaaagctggctgagtatttcccttgcgagcttcgataattaatgcatcataggcgttattaacagcactcttcgccgcgggactcgctgctaaaaatgcggcagtaagaagtttcaaagcccatttggttttcgggcacctttttctgctacttgaatacatcctgtattactccatgtattgccaaaatctctctctatatctaattacaggtaactgaaaagaaagatatttttgcatctcataatccgttattaaacgcggaagagacacgtgaattgttgatgatgagaagaagaaatgatgagcagattgtccatataaaatccttttctcgcccgaaaatccattccaatgatgaggatcttcaggaatacggcataaatcccaatgcctttttcaaaataaattaggattaaaataattaaatcagtaaattccgatgcataatttcggatttttcgaaagtcctgatgaaaggcagcgctactgcactcacgaatttaattgttattcctaatgtatctattaattaatgctttataatgattttattataatcctttataagtatttgcaagcctgccttgcagcaaaaaatatataaagcattaaagtgataataattgcattctgcaactatcatcatcggtattgtttgtgggtggattttcatattgacaacagtacagttcttatatctattaataataaaaagggatctacaacctacaggttggtgtagctttatggaaaaagactatttgggaattagtagtactgtattagtgagcttattgtttgggcttgcattggttttggttaatagttggttcaatcagccaaccgttgaggaagttgttccacgatcaacctatctgatggttatgattgctttattttttatcgatactgttgcatttatttttatgcagttgtatttcatttatgaccgtaggcaattttcaaactgtatacttagtttggcttttctaagttgtttgatttactttattaaaaccgtcattatcattcagcaaattattgaggggcgtttgacaagcagtgttgttcaaaatgacattgcaatctattatttgtttcgtcagatgagtttgtgcatattaatatttctggcattggtgaataaagttagtgaaaacacaaaacagcgcaatttattttccaaaaaaatgactttgtgcataagtttgttttttgttgttggggggccgatagttgctcacatactttctagtcattatgagagctacaatttacacattgccgagttaaccaatgaaaatgatcaggtggtttggaaagcctcatatgttaccataatgattttcatgtggttaaccttgctttcagttaatctatactttaatggtttacgctgtgatatctggaatggagtgacggtgattgctttttgtgccgtactgtacaatgtctctcttttatttatgagcaggtatagcgtgtccatttggtatattagtcgcactattgaagtagtcagtaagttaaccgttatggtaatatttatgtgccatatattcagtgcgctacgagtaacaaaggacattgcacatcgcgattccttaaccaatatatttaacagaaattatttttttaatgaactgacagttcaatcagcatcggccaaaaaaacgccttattgcgtcatgattatggatatcgaccacttcaaaaaagtcaacgacacctgggggcatccggttggcgatcaggtgataaaaacagtggtgagtatcattgggaaaagcatacggccagatgacctttttgcgcgcgtcggcggcgaagagtttggcgtcttgctgacggacatcgatactgaacgtgcgaaagctttagcggaaaggattcgggaaaatgttgagcgtttaactggtgataatcctgaatacgccataccacaaaaagtgacgattagtattggcgctgttgtaacgcagaaaaatgagttaaaccctaaggagatctatcaactggctgataacgcactttacgaggcgaaagagaccgggcgtaataaggtggtagtaaaagaggcagaaattcttatcaaccgcaaggatgatgaatgagtctgtcgctagttgtcgacctccgcctggggcttctcatccccccggtctatgcaatatacgaaaaaaaagctcgtactttcgtacgagctcttctttaaatatggcggtgagggggaccgcctgaaataaatctgacttaatccaggggggttatataatttcattataaacaatgtattacactttttgttgtccgatattatctaatgtattcttagtgaagcgagagactaatggcatactggatggcataccagagtgacgggaattagcgtatggcagtattgacggatacgaaagcaagacatatcaaacctgatgacaaaccattgccccatgggggaattaccggactgacccttcatccttcttcagtaaaggggcgggggaaatgggtttttcgttatgtaagtccggtgacacaaaaaagacgtaatgctggattgggaacttacccagaggtcagtattgctgaagctgcacgtactgcccggataatgcgagagcaacttgctgcaggtgatgatcctctggagattaaaaaggctgaatctgagaaagtcgttatcccaacatttgccgatgcagccaggcgtgtacatgcagaactgtctcctggatgggaaaatccaaagcatgtaaggcagtggttatcgacgcttgagaattacgcgtttcctcaactgggagcaaaaacgctggattcgattacggctgcggacgtggcagaaacactgcgtccagtctggttaaccttgtcagaaacggcaagccgggttaaacagcgcattcatgttgttatgcagtggggatgggcgcacggtttttgtgtggcaaatcctgttgatgtggttgaccatttgcttcctcagcagacaagaggacgtgatgaacaccaacccgcaatgccctggaggcagttaccgctttttgtggcgaccagtgtgtatagtgatgaaccttataatgttacccgcgcactgttattaatggtgatacttacagcaactcgctcgggcgaagccaggggaatgcgctgggctgaaattgattttcataagcgggtatggactatacctgcagaaagaatgaaagctaggctacagcatcgtgttcctttatcccggcaggctatttacattctggaaaatatacgtggcctgcatgatgaactggtgttcccttcacccagaaagcagcagatcctttccgatatggtgttgacaagttttctgcgtaaaaagaaagccgtcagtgacattccggggcgagttgccacagcacatggttttcgctcaacattcagggactggtgtagtgaacaggggtattcgcgggatctggcggaaagggcgctcgctcatacgctgaaaaataaggttgaggcggcatatcatcgtactgatctactggagcagcgtgtaccgatgatgcaggcatgggcggattatgtgatgtctcaaattgtgaataaataatagtgaaaatgtatattgtacgatcatgatttgatatgtgatcgtggcagtagtaattaaggaaccgcttttatgtcaaatgtattgagctgataattatcagatcgtcaggaaagcgtatttttataaacaggggattactcaacaatctcctgtttataaaaaacaatttgcctgttttaacgtttcactcctgctgagactgaattattcctagtgcgtcataaatcagtcttctgcgtagtttattgtttttatctgcaccatataacataaatatattttcaactttttcttcaggtgttctgagataatggataagaaaggttatcattccaacacaatggaataaagtgaatccatcaaacaggcttatcaggtttccttttttttcccgtgctgtaagtattttttcgcgggtaagaatatttgccagttcatggggggctgatatgtttctgctgtctataatgttatttattttaccaagggctatatcaacttcctgtaataggttatttatcatagctgagtgaatgttattggtttcatgttcctgacagtttatgaacttataaatcattgagttatacagaaatattactcttcctaataaatatgtgtttgtgtcattttgaagacaggactctgggtattcgtgatccagtgaaataaggttaatggactcgccctgataagtcataaaataattgatgtcatttaataatgctcggatatttacatgatttttactgaattttattttaaatgctatctttagtatagcaaacgcggcaatgataaatccaaaaggtaatttctcatagttcagtttattgatggtgcgatgaacactttcagtctttcctgaagtaagttgtatcaaacagttaacaaattccgtatagccatttaagacataatggcatgaagaatcttttaaagtgttttctatgttttgtaatgtgacgccgttgttcaatgtataaatgtaaccgccaaagacaatgttttcaatctcaacgacacaatttattgttttttgttcaggataaagataaatatcagaaatactatagtctcgtattgcgtcaatggcctcccacgataatgcactgtcaattttcagtgtataaaatggtgagttctcattaggaaagtaatatatgtatttgttcagtgtattcattacatctattgggttggttaaatataataactggcattcatattctgaaacttctctttcgcttatcagcattttatataaagttgccagggcgcttgttaatgaagttcgtctttcgaaagccagtaatatagtgagataataacatgcaacttgaattttatctaagtcagaaattattttttccttgtcttcattacttaaataaagcagatgtttacaggtttctttgcatgtgttgatagttgcggtaagttttgtttttcctggtgtactgtttttgcgaatattacgaatgaattcatatacgccatcaaagatatatttgaaatgcgcattcgctggtgtgtatccggataaacataacttaacgtaatttcgctgatatgtccttgcagcatgatatatatcatcctcattatccggtatctgagtgagaaaagaatgaatatgatagtaaaatgccatctcattatccgggcgatatgtgttcctgatgtcgagtgcgagaatcattggtacaatgtcattaaaatatttttgttttattatttgatgtgttttgtctgtaaaaacagaatagtgcattagcttaacatagagatcttcatatctcctaaatataacttttcgttgttctgtactcaatacttgttctttatcaataatgtttattaattcatcaaacatgtcgcccagtgaatgttgatgtgaggaaaaatttttaatatttcggatgtcacgggtattctggtttttagccagaacaccaaaatatgaaaagacatcatacattatagtgataaaattatacataacattctccttttattgcactatataaaattttaacattatatcattttgcttttctgttaactggttttcatttttgaatcaatattttctgaacagggtaatagtacacgtattaacagattatgtcagaaggccccggtgatgccttctgacgatagattaatgtggtattctattggtatctggagaccatatggcaacagttacagtacattctccccgctgtaattcctataaagtgtaccattatgatcacagcacctcagatcatgagcgtttccagtgctaatcctgcaaacgtgtgtatttcaactgaattacatctacgaaacccgaaaaccaggcattaaagagcaaattgttgaaatggttcataacggagccggggttcgcgatagctccagaacgctgaaggtggatatcaacaccgtcattctcactttataaaacgctcaccacgcaaagtaaccacatctccagtcgccagtgccgatgtgacgcttatctgcgaacttgatgaacaatggagttttgtcgaaaacaaagctcgtcagcagtggcactggtatgcgtataccaccaaatctggaggtgtgctggcttacacttttggtcctcgcactgatgaaacatgtcgtgagttgccggaactcctgaagccattctccacaggcatgataaccagagacaaccggagcagttataccagagaaatgccacaggataagcatcttgtcggcaagatatttacccggcgcattgagcgcaacaatctgacacttcgtactcacatcaaacgaccagcccggaaaacgatttgcttttcacgctccctggaaattcacgaaaagccattggttcatttatcgaaaacactgtactactgactggagtcattaccagggcctcttttgctgtttttttaccaatgaatgataatgagaatcgacagcgataaggggaaagtaaaataacaataatgctgttgttttctatcgtattgatttttaattatttattgtctttttgctcagcccacttttttacgcagacaaatttacccggggaatacaaactgtaacgacagttcaccacactatgggggataaaatgccagatcaatccggatactgctggactccttcacgcatcttacggatgcctgaactgagccaattgttaggtatatctcgttcgacaatttacgaaaaaatgaatccgttatcgaaatactacgatgcaaccttccccaggccggtacgtcttggtagtggttctgtgggctggcgttcatcagctattgacgaatggcttactttacatactgtacctgccagatcagcagtcaaaggtgttaatgacgaagtgcgacatacgctttcttcagatatgaccatgagcagataagtttttgtcatcacgtgatcacctcaggaggaaaaagaagcataagaacaatttagccagaagtttaattgataaacagaatttccagcattcattgttgaaagagcagctattgtcgctattgtagcggtaattgctgctataaccgaaacgtattacgaaaaaggaagcatttatgtcttacatcaaaccggatatgccgtattcagtatatgcgtgaccatcaatgatagggaaggcaataattaaagctcaatacaataaacaagtacctctgactctggttgcaatgtcagtattaacagcgatgtcaattgcctgtcagaatcaggttgacgtatgcagtcccggaaatttacgtggggccgttaatatttacactatggttctggagaaagggaaaagaccgggggaaaggtattagtgaaataatttctggaggtattaagaatgagaaatatgaatgatatttcgtggtaaataatacagtctgcactgaattaaccttatcggtttattaaacataagatctacaaatgctctgtatttctcagagcatcaggtctgaatagcagctattttcgctattgtagcgggagttgctgctattttactaacccattaatgaaaagagaggcttttatgtgcttacttgcaccagaaaatccttatccgatatatgcactaccaccgctggtgagaaatgcaataattgaaactcaaaaaaatacacaggcacctttggctatggtggcaacatccgcattaacagcgacctcaattgcctgtcagaatcaggttgacgtgtgcagacctggaaatttacgtgggcctgttaatctttactctctgattctggctgattccggtgaaaggaaaacgaccgtggataaagtgtttatgaaagcattttatctcagggatgaagccctggcggaagaatacgcgaaactggttgagaattacagtacagaaaaggaaatatgggagcaaaaacaaaaagcgctggaatcaaaatttcataaagagattcgtgccggtaaagattacaaggcaacagaatcagagcttgaaacgcatctgaataagtctcctgttccgccgcagatacgtcgaacaatttttaatgagacaacgatagagggaatgttaaaatattactccgatagcaatcgttcttttgctcttgtatccagtgaagggggggtaatttttgacagccgggccatgagtaaactgggaattattaacactttgtgggatggaggttctcttttcatcgacaggaaatcatctcccggaattaatttgaaggagccaagactgacgatgtcggcgatgattcagcctgatgtttaccacaaaggtttttgtacgcgaaaaaaagaacttgtgaaaacgtcaggacatcatgcaaggtttttgatgtgtcaaccaacatcaacgcaggggacaaggataataaccggagataattattcatcacagtatcaggagttatttgataagaggatcaatgaacttattgatgaaagtctggctatgagtggtgaacgacgttgccttcacttttctcctcaggctgccagaatctggacggattattacaacgatgtggaatcgaagctggggggattggggcctttaagacattgtcgggaatatgctgccaaaaatgcagagtatatggcaagactggcaggacttcttcaccatttgagcagtgaggagggggacatttccccttacactgcagaaatggggagagaattagcaatatggtacggtaatgagtatatgcggttgtctaatccgttaacttttgacaacactgctcaaaacgagactatgcgactcattccagaggagcttgaacttttcaactggataaaaagctattgcattgagaaggggatcccctgtatgaaaaaaaatgacattttacagcgtggtccgaaccgtttccggaaaaaggataaaatcaactggttactggatttactgtatgaacaaaacagagttgtaccggttattgagggaaaaacgttgtgtgtcgcacctaactttgacctcttaatgacttaatcgttgagtaacatataatctcctctgctacttgcggaggagactaatgcctttaccatgtcagcgttgtattagaaaactctggtacaggtcagtcagtaaatataactggtgtaaccactatttactattggatagagtgttgctcaggatattgtcggctttagtctgaggtgaggtgggaccttcattgttttcgtgttcaataaataatttaggttaattagtattattaatgggagttatgttatctgttatgttgtctctttttatcgtaatgtcactcctctttatgctgggtattctgtatgtgcgtaatgcgtctatccccatatactacagtgtggtggtgtatggggtttagttatgtgtaaattatgttactacactcatagcgtaatattgaaaaagttaatccactgaatgtatgtctggtttgtatttaacactagttacgtaccagaacactattagagtatattgtctttagttcgtacgttatagctccgttacagtttataagtatgggtaaatataatcttttctgtatgaaataatcttcttattgtgaggttaaatatctgtaggctctctctgcagagtctctgtttttacttaatggtacggcaatactaatagcgatgttgcctgtggctattcgatagctgacttttgtgaagatcagattacttcctgtaagtgattgaatggtgctttcttaaactcaattatattgaggtgtgtttttgccattgtaattcttactggtcctctgtttaagagagcctcactgtattctgaagtattacccccattactgtaatgaggtaatacgaaacagttttatcaggttgtctgcatactggttacccagtttattaatgccgtggtacgacgtttctgtatcctcagcatttacgtaatttcctcttcctgtgagttttataaagtaaggactataaaatgtataatgctaaccccaattacgaaatgaatttcacgattctgaaagatgtgaatgaacacatggaaggtctgtttcaacgtttttctaaactgttacctttcagaattgattttgcctacaggaaagacacgcccagtttcgggcattcctgtaagcacagtatgtgtattgaaatataccgtttacttagcgaaacccagacgatgttggcaggatattactgggtaatggaatatacaccagacaaagggcttcatattcattttatcggctatctggatgggcaacgtcacaagaactcttatcagatatccaggcaactgggggatatctggaggcggatcacggaaggggagggttattttcacctttgccgggctaaagacaaatacccggtgcgtatcgatcacgtgattcactatagtgataaatctgcggtagacgacttacgttacgcccttagctacctggctaaacaggatcagaaagaacacggtattattctgaggcgtagcaggctttccgaaaaaagcaaccggggccgaccacgactgaacagtatcctgccagggatatgttctcagctgtaatgttctgaacaacaactacgggctggctcttttttgcccgtcagggcgtcaagctgagccgtgcattattctccaactgggtggacgcatgctgccagttaatggctccgctgaatgatgccctgtaccgttatgtgatgaacacccgcctgggaaccatccacggcacgtcggtcggcgaactgctggcgtggatcaaagaagatgaaaaccctagcaaaggcgagatggtgctgattattgaaggccataaagcccaggatgacgaactgcccgccgatgcgctgcgtacgctggcgctgttgtaggctgaggtgccgttgaagcaagcggcggcgttggcagcagaaatccacggagtgaagaagaatgcgttgtataagtatgcgcaggaacagcagggggactaagcccctgctgccggttttgccgggtggcgcttgcgccttacccggtctacttattgggacaagcgtttagttaatggtcaccgcctcaaacaccagcgtttccagcggctgcaacgtaatcaccgtcgcgtttttatactcaacgggcactgttttattgctgccgtataccgctttcagactaaactgcgccgcgtttcctgccggtatttcgaaatccttcgccaaatccagatagtaggtctgtggcttatccgatgggttgcgcaaaccgagaatggctttgtctttgctccaggatgcccagccgtacacggcaagcgccgttgggtcgccgccaatccagtgggtatcaaccagcacgctggcattttccttcgaccattttgcagccttcgccagcgtatcccacttcaccttgttcagcatggacggggtaatatacagctcctgcagctgggtgccggtcgcgaagtagctccagacctgatcggcaaagtcgctgtccgtttgcaccttctctaacccgtaataggcattctcggcgctgactatcccgtggtacatcagcgagttcagcgggaatagcgggcctttacgtacaatagagcggtatgtctcggcatcacgatatgttatccactgctgcaccggcgtgccggggccatacaggtttatatcatccccctgacgccagatagaatcagcatagaacaaccaggacgggctggcgttggtgccggtggtcaggttgataaatagattcgggtttgctctgcgcatattgtgcagcagagctattgacgcatcaaaatccgaggcgaacgggctaccctttatatgtgaactggcgttccccattccgtcgagtttaaacgaggtaatgtgttcatttttgataagattaatgatctgctcattgaagtttttaaagtagttcgctcccgaaagcgccagcttgccgtccacggtttcgaacccatactcttttgcatgcgaaacgcgaacgtcgcgcggcttattgtaacccccccacggtgaaagccatagcccaacggagctgtgcaggctatcggctttctctcgtactttgctaaaaccgttgctgaatgccgggccaaataaccagcgtccggtaagatcgtcccagccatcgtccagcagaaaagcgtctaacgccactccgcggccgctaatgaattccttgttccattcgtccatgcgtcccagaacatcctgttcggtgtacggagtgaaaaagccgatatccatccaactgttgtaatgcaaataaggcttgtacggacgtggacgtacggcattaataaactggttcacactgcgtcgcaactggctggtttccgggaaagtaccgaaccaggtggtaaagctaaccggcgtctctggctgaattggagttttcagttctacgttgagattggttgttgcttcataggcgtaggtattcacgatcggtttattcggcaggataaagaacgagtccgcaatgatcggtgagctagtgattgcgccgtctacgtaaggagcctgaaactgttttttggtcgggaagaaggtaatcttggcgacgtctcgtggttgcccaacggcggcaatagtgtagtcgatgctggcatattttcccttcacaaggttcaactgcactgttacgttaaaatctgggcgcgtaaagtcgatgacaatcgcattgtcctgttttttgatgtgcttgattttgaaatctgcggtgtggatttttgtctcatccggtagtgtcagaaagaacaattcctgtggtgtgatcggatggttagttctacggtccttcagcacaatcgtcgagtttgtatcatcaaacgagagggcaatattatcgttattgaacgtatagtttgctgctactgcactatgagacacacacagagccagtagtgagagagtgagcactttcttcattggtgtaagatccttatctgtaatgttactgcattcggttggtggatcgctccagccagtagcgctgagagccaaaattaatctgtaggtagttttcaccgttttgtacatagtggctgccgtcttctatgaccacgcctgcttgccgtgcgaaatgttgggttagctgcgttgcgctactctcatccgcgcttacgtctatccacgccagatacgacgattccggggtcatcatcttccacgccgggaagtgggtctggagggcatccgccagataccgggcgttgccttgcagataatcgttcagcgcgtcgagccagggcagaccgtgttgataggccagaatgattccccataccccgaacaaattgggcgaggtaatggagttcttctcaagctgctggcggaagcgctggcgcagcgagtcgtctggaatcatggagtaggaggttttcagcccgcccagctttaacgctttgttgggcgatgtgagcacgatcaggttgtcctgggcggcacagccagaggtgagacaactgacgaatttgccatccagaatgtgttcagcgtgaacctcatcgaccaccagaatcgtgccgtagcgttgacagagatcggacacctggcgtatttcttcctcgcgccagatcctgccggacgggttatgcggcgagcagaagaaccacagcgttggacggtaggttttgagctgttcttctatcagattaaaatcaagctgatagcggttttcctccacgcgcagcgggttagccagtacctgcacgccctggcgctgtgccgccatcgcaaaaggatcgtagaccggcgtgttcatcatcacgctgtcacccggtttgcagtacgcctgaatcgtgtagtgcagcgtggataccgtgccgtaggtcaacgtgatccacgatttttccacctcaacctgatgacgtttgcgctggaaggcgatgactgcgtcgtagaattcgtcaaagcaccaggtataaccaaaggtgccgtgctccacgatgcgccggaaaccgtcaatcaccgcaggcggtgaggtgaaatccatatcggctatccacagggggataaaggactccgggacgtcaccgaaacgcgagcaaacaaaggcatggtcccatttacggcacttatcactttgacgctcaatgattttgtcgaaatcaaacatcactcctcctgttaaattaaggcttcaatgccggttttgacgctctgtacctgcgctccgatgatcacctgcacgctatgcgcatcaagcatcgatcatcgcgctgcgtacgccggcgtgaaccttacggcgaatgtcatccaacgattcgtgatgatcgagatgcagtgctagcggcatgtcgtaagtgatcgaatacgcactgcacagggcgtagatctcttccagggcaatatgtttgaacgagccgggggggccccgcgaggagcacgggcgagcgcatttcgctgcacacttcgaggatcgcctggatcgtttcggcgttgtggatgttaaacgtcggtacggcgtaggcgttggcctgcgcatcctgcagaagatatttcgttgagataatgctcataaggggagcctcttaagcccgctatggatgaataatcacaccttgcaccacacggttaatcgtgccgctggcagaggggagatctggcgtattgccaacatgaatcgactgagccagcgcaaagacctgggcgtacatcaggaagcagaacgcctgttccatgtcgataaacgaacgggaaggaggcaacaggatatgcgggcccgcttcgatgatggcatccgtttccaccgcaattgcgatcacgcgcattgcctgacgatcgcggcgcagttctgtcagcagacccaggtcgtactggcgcgtgtaagggtggctggagatgtacaccacgataagcgtttcgctatcgaccagcgattttggtcgcagatgatcaccacccagaatcagcgcatcctgggggaaattcaacgagtcggcgagctgacaaacaaagccgcgaaaatcggcgggcgtcattccggtataaccgctgaactggtccacctgattggaggttgcttcaatcagtaacggcgtttggtttgcactggcgtagcggattgcagcttccagcaccagcggatgtgcggaacaaacggcataaatcccatttgttttgcccgctttgtgctgcctcaccatttctgtcagatgtttcacttgcctctccagttccgattactgcgatattaatctttcgttttgtttcagtttatactgcgtcatggtgagataaaaacaaaacgaaagttgcgggttttctgatctgattcacaaaagaaacataatgaaagtcactaaaacgagagtagcttgcgccaatgggcagtgtgggcttgcatttgcttaatagaaaggcgttaataggcaaaacgaaatgaaacgaaagttttacgaaaggacttactatgagtaataccgacgcttcaggtgagaagcgagtgacaggcaccagcgagcgacgagaacagatcattcagcgtctgcgacagcaagggagtgagcaggttaacgatctgtcggcattgtatggcgtatctactgtgacgatccgcaacgatctggcgtttctggaaaagcaggggatcgctgtgcgtgcctatggtggcgcgttgatctgcgatagcacgacgccgtcagtcgcaatctttttacggtgatcaggctgagcaatcgctgcaaaattaccacttcgatatgctgtttcttggtgtagatgcgatcgatctggagtgcggcatcagcacgcataatgaagatgaagcccgtttaaaccgtcggatgtgcgaagttgcggaacggatcatcgtggtcaccgattccagtaagttcaatcgttccagtttacataagatcattgatactcaacgtatcgacatgatcattgttgatgaaggcattcctgcggatagtctggaaggcctgcgaaaggctggggttgaagtgattctggtcggggagctcgcgtcttcgctgtgattcactatgcccgataaacaagcgttatcgggcataatacaacttgatgtatgaagagaatatcagaccaccggtgccgggttaaacactgccagctggttatgcaatccccattgatccgagaaggttttcttcttcccgctggcgacgtcgagaataaagtggaacaacttccagcccacctcttcaatggtctcttcgccggtagcgatagtgcccgcgttaatatccattaaatcaaaccagcggttcgcctgcccggtgcgggtcgccattttaatgacgggtaccgccatcaggccgtacggcgtaccacggccggtcgtaaacacttgcacggtgatacccgaagccacctgttgcgtgccacagataaaatcgctggctggcgtcgcggcgtaaattaatccgcgtttagtcgggtgttgaccgggcgacagcacttcagcaattgcggttttacccgatttagcaatggagccgagtgccttctttaccacgttggcgaggccgccctttttgttgccccgcgaagggttggcgctgcggtcggttttgcccatatcgggatagttatcgtatcaggccatctcttcgagcagacacctgcccacttcttcattgatggcgcgcggcgttaacagatgaatggcgtcgtgtacatcagtgacttcggagaacatcaccgttgcgccgcagcgcaccagcaggtcagaggcgtagccgacagcggggttagcggtaacgccggagaacgcgtcgctgccaccgcagtgcatgcccaccaccagctcggaggccgggcaggtgacgcgctggcctggttgagtttttccagatggtgtgcggcagcctgcaggatatcgtcgaccattgatttaaagccaacgtgctgttcgtcctgtaggcgtacgatgctggctctgtcgaccgggatgctctgcacatcttccgttcctttctgcaggcgctatggctgtagcttttcgcaaccgagacccaccaccatcacttcgccaccgaagtttgggttcagcgcaatattatggatggtgcgaattggcaccacggcggtcggtgcattaatcgctacgccacagccgtagaggtggttcaagtcgaccactccgtcgatgctcgggtatttcggcagcaggttgcgttcgataattttaaccacgtagttcacaacgtctgccatgcagtgcacgctggtggtaatacccaacaggtttttggtgcccacgctgccgtcggcgttgcggtaaccttcaaaggtgtaatcttccagcggcggcagcggctccggcactttggtcgcccgaggcagggggttaagcggcggcgctttcggcagcgtgaccgtggatttgtcgatccagctgcctttggcgacatcgcgtaccgcgtaaccgataacttcgccatagcgaatgatttcaccattctgaggaaggttgttatcccttttctggcgtattcgtcattccattcgtatccccggtaccggatgtttatatcgtactgtgccggtgcttgcgtgctttcctgcaggtctgcaccgatttaacaaacaaaacttaacagagtctgaaggagtagtatttcgtgcaaataaccgaagcgttattttcagagcagggagacatccggcgttttgttcagcaggcggtggaccactggacgcatctgctggcagtccacttcacactccattcggcagaaggaaatatcaacgggcaacagattcatgcattctgtacttccttttatgaacgtattactgagcgtaatcacacgaccagtccatcatcgccgctggtattacgctggttgcgggaacaactacatggaggagcaacaatacgatgcctgttgctgctcagccagacgagcatttgccatccgcgagccagtgtgacaggtgatgaagcatgttcacaactggtggatttactgcaacagacctggcgggtgataagtgctggcggacaatgtcgggtggaaagttttttttcgggttgcccggcctgatacatcagagcaatacgttgctttaaaaactgctgttcagtctctgatgctatgggttattgcaacaatcatccggtgatggacgggagaaatatcgactcttccgttagtttttacaggctgataaagttttgccagctgaatctttatacggaatactctccagtatgcgtaagagaatttgctttttggaggggggcgacaaccagatggtaaacaaaagaatggttgaatgtggatgaggttcatattcattgattcagattttttgaagaatcaccacatgggatgtccatgtggttgtataactcagggccagcgcttaatgatgatggatgtattaatgccgccaaaggcaaagttgttactctgcaaaaactcacaatcaacctttcgggcttcatgcatgatgtaatccagcgcgccacagttcgggtctggtttattcaggtttagcgtaggcgcaaaccaaccttcgcgcatcatttgcagactcatccaggcttcgagcgcgccacaggcaccaagcgtatgaccaaaataacttttcagcgaggagaccggcacattatcaccgtaaatggttgctgtcgccagactttctgccatatcaccgcgatcggtcgccgtaccatgcgctgaaatatagccgatatcttgtgcacttaacccggcgattttcagcgattgctccatacaatactgcatggtttcgcgctgtggctgggtaatatgtgccgcgtcgcagttagtcgcaaagccgacgatttcaccgtaaatggtcgcgccgcgcgctttggcgtgctccagttcttcgaggatgagcgtacctgcgccttcaccaatcaccagcccgtcgcggttttcatcgaacggtgaaggtgtggttttcggcgcatcattgtgctggctggtggcaaaaagcgtatcaaataccgctgcttctgaagggcataactcttcggcaccaccggcaaccatcaccgtttgataaccatggcgaatggcttcccacgcgtagccgatagcctgactacctgacgtgcaggcgctggaggtcggaatcacccgcccgcgcagtccaaaaaacagcccggtgttaacggcagtagtgtgcggcatcatctgcacataggtggtgccagtgatgttgttcgtgtgcttttccgtcagcatggtggcgaactcgcttaccgggccggtactgccggtcgatgagccgtatgcaatgcccgtttcgccgctggttaatatcggatcgccaatcaaccctgcctgctctaacgccagctcgctggcacgggtcgacatttgcgacacgcggcccatcgcacggatacgcttgcgggtgtagtgctccggcagcgtgaaatcatcaacaggcgcgccaagcagggtgtgcaggccgtcgtaaacctgccactccggcattttgcgcaccgcattttcatacgccagtaagcgtgcagaaacgtcctgccagttttcaccaaaggcagtcacgccgcccattcctgtaatcactacgcgacgtgtcataacatccctccattgatggaaataacctggcgggtgacgtaacccgcaatatcagacattaaatagctggcaagcccggcaacttcttccgcctggcccatgcgtttcatggggatcatcgacattgcctctttcagagcgctctcttccatttcgatcatcccggtatcaataagccctggcgcgatgcaattgacggtgattttgcgcttcgcgagttcgatagccagtgcttttgttgcgccgataattccggctttggcagcgctgtagttcacctggccgcgattgcccattacgccggaaaccgaggacagcgtgatgatgcgcccaccctggcgtgcgccgatcatcggcataatgcacggctgaatgacgttgtagaaactgtcgaggttggtgtggatcaccgcatcccagtcgtcattgcttaaagccggaaaagcggcatcgcgggcgatcccggcgttactgaccacgccgtaccaggcaccatgttgcgcgatctcgtgctccagcacttcccgacactgttcgcggtttgcgacgtcgaaactgagcaaacgcccgttacccccgttggcgacaatggcgttcagcgtttcctgagcgcccgcggcgtcacggtgatagtgaacgccaatgttaaagccgtctgccgccagttggcaggcgatggcgcgaccaatgcctttgctggcaccggtaaccagaactgaacgactcatcaggacgctccttgttgaaacagggtggtaagttcttccgcggtcggctggaaggtgttaatgcggcccgtcgcctcgccgtcgttgatgctgcactcaaaactgccgaagcgatcgtcctgcatcagcagcttgacggtaatagtcagcgtctggcctgcgggcagaatgccagcggtgcaaagcaattcacgcgcgcccagtatcatccctaactcaatactgtttttgccctgctggtggcgatgccagccagaccagacgccgacggtttgcgccatcagttcaagggcaaaccagccagggagattgccgtccgggtcgagaaacggtgccagtacgccactgggcgaaaccgtcacgcggcacaccgcgctgtcatcgctgacgctcaccacgtcttccagcagtaacatgggcgcgtcgtggggcagataagcgccgggggataaatagtggctcacgaaaccctcccgagcagaatgctggcgttattgccgccaaaggcgaaggaattggacaggatcaccggacgtgccagcggctgcggtttttcgataatgccacacggtggcagcgtgggatcgcgcggcgacagactgaagtcctgagcgggcagcggtaaatcacgctgtaaaatcaacatactaattgctgcctcggtaatgcccgctgcgcccagcgtgtgtccggtcaaatgtttggtggagctgcacggtacgcgttcgccaaacagggcgttaaccaccattgattcaatctggtcgttgagctgtgtggcggtgccgtgcaggttgatatagccgacgtcatccggcgtaagctgcgcatcggtcagcgcctgattaatagcgcggatcgctccttcgccctgcggatgcggggctgaaatatggtaagcgtcgctcgattcaccaacgcccagcaacgcgatgggctgcggttcccgggtcagcagcattagccccgccccttcaccaatggtgatacctgcgcggtcacgaccaaacggctgacataaggttggcgacagcgattcgaggctgtgaaaaccgttaatcggcatccggctcagggtgtctgcgccacccacaatggcggcatcgaccagccccgcttcgataagcctgcgcccgctgattatcgctctggcgctggaagagcaggcggttgaaagggtataggccgggccgtcgagcgccagccagtggctgagaaaacgcgacggatcgccgagttcctgttgcgcgtagtgccatgtggtgctcggctgcccgtgggtgcgcaggttaacgtgcgtgtcgccttcatgcaggccggaggtgctggtgccaagtacaatcgcgatgcgctcgcgaccatatttcgctatagcgtcatcaacctgcggctggagctgcgccagcgccgccagcaggatctgattgttgcgcgagcggtgcgcagcgaatttttccgggataagcggaagctcgccatccacgccagccaggaccgcctgcggatgcccctgcaaccagcctgcgcgcgggcgcattccgggagcaacaccgcgagtcaggttggttgcgatttcgtcaaggttatttcccagggcgttgatcatgccgacggcggaaatataaatcatatcagtcacctaagtattgaatggtgatgtggtatttaaagacatgctgctcaatgctgattggcacgcgttttccctggcgattcagataggtgatttccgtgaccagtttgccgctggcgttacgcagctcgcgtttgtcgccgttgtcgcgaagcgtccagcctgtgggaagttgcggttgccaggcgctaatcggccagtggctgagcatcacgtcagccagtacctgacttgcgggcggtaactgtgggacgacgatggattgctcggcgcgtagcccttttgcatcgtaggtcaccagaaacaggcgaatgccgaccgacgacagcccggcaagggtgattttctgatcttcggcattaagcatcactagcagagactgggttttgccgttgaagctgccggtcaacagttgctgggaattgactgcgggtgaaatccccggcgcaggcagcgtgatgagcgtaccaggttgcagccacgcctgcgggcggccttcctgttccggttgcgagtggctacagccagtgaggataagcgtagcggtcagggcgagcgctcgccagaatgtggatttgatcatttttttgttctctttttatcgggcatcgccagcggcgaaagcaggaaggcggtgaaaataccgctcaccagcacaatgccaaaactgctgatggcctgggtggcgctgaataccagcattcccagcgtcagcaaggtggtgagcattgccagcgtgatcgccagtagggaagttaacggtgtaccgcgcggattactgaaaaacagcgtgtaattgatgccgatgccaagcaccagcaccagcgccagcagcgaaaagagattcaccgcctgcccgctaatcgccagcacagccagaccgcagcccagcgaaagcaccgaaggcaccaggctgataaaccctttgcgccagccgaggcgggccactgcgccgcaggcaattactgccagcgccaccagcaacaagccggttaacacataacggtaaagtgcgaacaattcatcaaaggtgtttttgcgatcaacccaggcaatgccacaagggtaatagctggagatttcctgtagcgccgcgctatttttaaccccttcaaccggcaccagcacgccgcttgcgccattttccagcgtcagccacagcagacgccagccttcactggcggggcttgccagccattcatcaaccttcaccggcatggcgttgagatccgggttcactgttgtcagcccggcattttgcagtgcttttgttactgtcggggccgctgttgtcagcagatgtaaatcttcctcctgccgcgcaagggagttcagtggaatggtgcggtatttgctgataagcccgtcttttttcgccttctccagcgaggtggtaaatttctccagtcgccgtaatgtttgctgtggggagtcgccgtaaaccacgaaccatttttgatcgacgctctgcccggtcagggcggtaatggctttctcctgcgccagaatatgctgcggcagcgcctgtaactgcgagatatcgtcatcgacgcgtagcattgacatccccgccagcgaaaacagcgccagcgcgacggacagaccccgcgacagttttttattgcgccgccacgctgccagccagcgtagcatcagcgccatcgccggaaccggacgcaccggcaggccacggcacagccacggatgccagaacaggacggtcagacaggaggcgctcaacccgatggcggcaaaaatcgccatctggcggataccggggaagggggcgagcatcataatcagatatgccgccacggtggtgagcagcgccagcagcagggcattgcgtactttcgccaggctttgccacggcgaaacgtcgttgccgtgcaccatccgctcggtgagataatagagcgtgtagtcagcggaaatgccgataacgctcatgctcatcaccagcgtcatcaggtgtaattcaccgaaaatcaataaagtggcgaccgttcccgccagcgcgccgatgccgatggaaatcacgcaaagcaacaatgggcgcaaagagcggaacaccgccacaatcagtaatatcacccccagcagcgttgccacgcccagggttgagatatcctgcttcgcctgttgactggcgtaatcgctgtaaaataccgtgccgcgcgagagcaactgcgcctgtgggtaacgcgttttcagatccttttccagcgtattcagggtcgtgatgagctggtgggtttgctgcatatcaaacgacgatcccgccagttcaccgtgcagcagataccagtagttgccctggggatcctgcgtcaccagccagccgtccatcagccgcaaacgctggccgtttttcgccatcgccagctgcgagccgcgcattaacatcagcggatcgttttgcagctccttgccgcttaccccggagaatgcggaataaagctgggagaggatccactgcgcctgcgcttcgccgccgttttgcaggcgggcgcgggtgtcggggtcaatcaggccgttgcggtgctgccagaaaaacgctccccacgattgctggctggcggcatccattggtcctttaacgtcgccgagcgcagcggatttttgcagcagcgtcagccactcctgagcgaccctgggattagcctctttaccggggctgaccagccacaccagttggcggtccagacgctgcataaagccgtcattcagcgctgggggaatatcgcccatcacctgtttgggtaacatagccagcacgctactgttcagccgtgattgcggcagcaggatcagcaacgccgccgccatgaccaggcagactagcccccataacagcgcggggcgtttactgggcggcaaaacgttggtgttcgtcatcggtcagttgcgctggcgtcagttgatgttgggtaagagcaatatcggtgcgatcgccctgtttatcattaagttgaatgctctccagataggttttcccggcgagatcgatggtgttgaaaattttatccagcggcgtggtggtcggcgtcaggcgcagcgtccagcggccttcgcctttgtcagcaaattcgacgcggaagttttgttccagcactttgcgatcggcctggaacagcgcgcgcagcaggtggttaaactggaacatctgcgggttgttttctgccgtgatgatttgcggcggctgaccgttgatcacctgcaccatgcgtttatcatccagcaatagctgcatggggaacggtgaggtttgatcccacaataacccctggtcgcgggcgatcaacatctgaccctgagatcgcagcggctgcggcagatctttaatcgtccgggtttgatcaaaatgggcgcggatcaccggttgttcggtaaagcgttgctgaagatcgtccagggtcagggcgctcacaaacgggctaatcagcagcgccagcagcggtaaaaatttcatggtttgactcccatgcgttcaaacagaatatcggggctgacaaagcacagttcgcgactttgctcgtcgaccgcgacctgaatggtgtatccggtggtggcgcgtttgcccgtttcggcatcgaaaatctgatagccaatccgcagacggttttcgaactcttcgatatgcgcacgcacgcggatgcgttgctcaaaggtgagggcgtggcgatatttcacccgcgcatcgaccactggccacaaataaccggactctttcatctgccgatagccgtaattgaactggttgagcagcgcctcgcgggccacttcaaagtagcgaaaatagttaccgtgccaggccacgcccatcatatcgacgtcgtgaaagggaatggtcagctcgacttcagcggtaaatcggggatcgttaagcaccctttactccttgtcctgaatttccggcagttgccagaaatcgaaaaaattaaaccagtcgaggggcgactggagcgcgtaatgttccagacgcgcggcgtagtggtcgatagcgttttgcagcgcctgttggcgttcgccacgcggcaacagcagcgggtcggcaaaggtttcgcagtgaatatgcagcttgccgtgctggcgtagggcgaaaatcagattcaccgggcagcgcaaaatagacgcgagaataaacggcccctgtgggaaaggcgcaggctggcccataaacggactccagcagacgcgccagtcgccgccgcgttgcgggttgacggcgatgcggtcaccgacaatcgccacccattcgccgttatccagcttctctttcagcaggatggcggtttccgggccgatatctgttaccggcatcaggttaatgcctgcctgaggagccatctcctgcattatctgtttaaagcgttgggcgttttcgctaaacaccagcgcgttaatggttttgtagccctgaatttttgccagcgcccggcacacttccacatcgccaagatgcgaggccagcagcaatttgccgcgcggatcgcggacgtcaagcgccgcttctgcgcctggcgcaaacagcacatcacgccccagttgtagctcgccgcgccagctggcgattttgtcgagcatggcattaccgaaacgtagaaagtgctgatagctgttgatttttgctgcctgtggttgttgttggcgcacacgggcgagccagtcttgcgacgctttacgcgcacgagcagcggtgagccagtagacgcccaccaccgggtaaagcagcgcggtaaacgccgttcttcccagcagacgccagaccagcagcatcaggcgcattccccataaccctttaacttcactctgccgcgcccagtggctggaagagtggcacatcagcagtgaaggaatacgcggcaacatgccgaaaaacagacgcgtgtgcatgagcgagatgcggacgttatctttcagggcatcaaaatgcgaaagcccgtccagcggataggtgacgcgggtcggcacgaaatagctggtatttccctgccagtagaggcgcaccatcacttcggtgtcgaaatccatccgcttgccgatggtggcgcgttttgccagttgcagcgtcggcgcaaccggataaacgcgaaaaccgcacatgctgtctttcagttgcagggagagcgtttcgatccatacccagacgtgggtgatccagcgcccgtacagccgtgagcggggaatggagtcatcgtaaattggctgaccggagatcagcgccgcagggtgttgttcagcgagtgccagcagtttggggatatcttcaatcgcatgttgaccgtcagcatccacttgcaccgcatggctgaaccctgcgtctgccgctgcctgcaagccacgcatcaccgctgcgcctttacctgcgttttctgccaggcgaattaaggtcacgccaggctgttcgctaaccagattatccagttgctgttgcgtggcggcatcgctgccgtcatccaccacaatacagggcagattaaatggcttaagacgcgccagcacgcccggcatcatcgcgccgtggttgtagcaggggatcaacacgcagggagaaaagtttaccgacataggcggatcttcccgctactggcggtgtggcgggcgtcaccgtcgtgacgctgatagcagaaagtgagtacctgacttgtttcctgccatgttaattgcagggtaacagtcgtctcaggtataagtggcgccagaaatttaacattctggatactacgaaaacgccagcccggagcaagcagcgtggtagcataatgcattacccagtccaactgggccacgcctggtaacagaggctgtacggcaaaatgaccattaaaccagtagagcatcgggtcaaggtatagaacgatttccatctcctgcggttgaaccagatggcgctcaatttcatggcgtatcatgaaataactcctgtaattgcgcatagacacgcttattcatattgtttactggtatttcatcaataatgcgccagtaacgaggtactgcaacaggttcaagccatggtaatagtgctttgcgccaggacaactccagagttttccctccggagcattgccatatttgacgggcctctttatttggtacaaccacgacaccgatagcctggcgaccattgcgtattaatggtattgcagcgacatccataataccgtcaagtgccagaagtcgttgttcgatttcaaccagtgatatccgcttctcctctatttttaccactcgaccacgtcgtccgatcaggtggaactgaccgttttcattgaattgcaacatatcgtcaagcaccaatccttcagcagggattagtggcgaaaagacacgaaccccctcactttcctgtgaaagatgaacatcagaaaaagtaaaccaggggatattatcctgttgacggtaacgccatgcgagaatacctgtttcggtactaccatagatttcatcgggccatatattcagccaggtggaagttttctctacatcctgccatggtagcataccgccggcagagagaatcatttccactgggggaggcgtcagatgaaggtcgagtcgcttaaggaacgccgggctgctgacaaaggcatagcggtaggtatggcttaatgcggcaagttgctcagaataccagagcattgcggcatgcaatggcaggccaagtgccatgggtaaaaaaatacggaaagtcagcccatacaggtgctgaggcatcacggatgctacaaaacgacagcccagtagtcggtctgcaaagtgagttgccagcatgtttgcttcttgatcaaggctgataagaggttttgcaatttgttttggttgtccggttgaacccgatgtgaaaagttcaataaacgcgtcagaagcaatatcatcaaaggctatcgtgctggtcgtcatctggtgagatgtgcttacaacaaactgtggaccgttccagcccagccttttatcactcaggacgcaatcaaacaaggagcgttgtacatttaacaaagcggcgcgattatggcccgggattaccgggattttacctgagtgtagcgtggccaacaacgctacaataaaaagatagctgttttcaaaacaaagtgcccagcgattgcctggctggtcgcgtaaatggtcgatcaaaagcgctacatcatgccgcagatgccccagtgtccaggtatattccccaagccaggcaacaggagttgttacagggcgagaggctgtcaaccactgtgaaagagagagagtctgattcatggtgttttccgtttgatcatcttacgacgtatcagccattcccctgcagtcaggaaacctatcagaaggtaagcaatgataccgttccaggctgtccacaagggcatgttgccatacaaggtggtaaataacgcaatactgccattgaaaataaaaaacaggcaccagacctgcgttacgcggcgggtatatcgcacggccttttccgggaggtctggctcctgcaaacgtgccagccgctcaactatcggcattgtcgaccgcagcgaaccgccaaaaaccgccagcatgactgcgttaaccactaccgggtaaaacagcagtaactggtacgttttcaacagaaaactggagacacacaatacaatgcccacaacagcaacgatttttgtgacgacctggagcggccccgtctggcgacggggctggcgcaggcgcaataaaagcaacagcgccatcagcggcaacagccagtgcaggctgttatgcaccaaacctagccagattaaaaaaggccagacgagcagcaataatccggtcagcaacttaatcatcggtagcgagcgaatgcccgacatcaaattagccttcttgtagcaggcgttctacagcctcgacaacatcctggactgtacgcactgctttaaactcttccggcttgattttcttaccggttttcttttgcaggtgcacaatcatgtcaacggcgtcgatgctgtccagttccagatcttcgtacagtcgcgcttcaggtttgatgtcctgcggatcgatttcaaacagcttaaccagcagggctgagacttcctgataaatggtttgttggtctgtcatgatggttttcctcaggcacgttgcgcagcaatgaaagaggccagagtggcgacggagaaaaagtgctgacgcatttcttcgctttccgcagagagcacgatgccgtactcattttttactgccagtcccagttccagtgcatcgatagagtccagccctaaaccgtcgccaaacagtggcgcattgatatcaatatcatcaggagtcaagtcgtccagattgagggtgctgatgatgaggtttttaatttccagataaagcgcttgcattatttattcctgatagaggtaaacaaccttgctgtaattgaagcaaaagatgccggtttaactgtcttgcagccagcgtcggctcttgtgaagttgcatcgtaaaatttattgatttctacccgcccatggacttcaaccgtaaaaaacggcctggcaggcgggacgtcataccacttactttgtttatccagcagatgctcgctacagccgatcgtcacgatgcgtaaatcgctggtgcagcgcacggcaatattcgctgcaccgcgctgtaacgtcattttttcaccgggcttcgttcgtgtgccttcggggaaaatcaggatagtgtcaccctgtgccagtcgctgttggcagcggggtaacagggtttctgcttcgctgttgattaaataatctgccgctcgcacgacgccgccaagaaaaggattttttaacagcgcgcttttcaccaggcagtcagtttctggcatgactgatgccagcagcacgtaatcgatcagcgtgggatgattggctacgacgaggcaaccgcgttcctgacgtaaaatttcagcgccatcaatacgataatccagcacgccaagccctttcgcgacagttaaaaacaggcgaaaactggcggcaatgctgcgacgtgccaaacgacggcggcgggaagtatcccacactaaaactaacaatatgttaaaccacacgactgaaagcagcaggccgccgagaccaaacaggacaaaacataacccggtcatgaccagtcgccatgcccatcccaggcgcgacatcagcttactcatctgcggctccagcgccattgcacgcgctcgccaggcagtgaaaaagcatctgcattttgtaaatagtgctgtaaaaacaacatgctttgcggcagtgttgtttcatttaccgcaatggcttgctgcgtttcacattgccagtcatcgccagcttcaatcaccagcgcgacggcgtacggccaggtaggcatttctgcgggcagttgcgggtgataaaactcaggtagaaagccatcaaaatcgaccatcaacacgcgctggtatcccgcttgtagcaggctaagcacttcacacaaaccttgctggaaactgtcgcgaccagccgaaagcgatgacgaaacgatcggctgtttggccacaatggtcaggttacccacggaagagttgtgtacggaaagcgcgaagtccgtcggagaaagcgcctgttcggttgccagtgcatgaacaatgcggtaattgcgctccagttcgccatgacgactggtatacaaaacagcgtctggctgatggcggcgtagcattgtcagaccgcattcaacagccagtttgctgcctgaactgagacgacgagcggtcatcattggcagttcacttaattttgccaacggcgcggcagggtcaatcgcccacggctggcgcgaccatgcttgccattgctgcacatcgctaagtccaggcgccagtgcctgccagttggtaatatttaatgcaaatttcatcaacgcgcgcccgcggtaaaccaaaattattaagtgacgattatttcttttggcatatcaaaagtgtatgcccaacgcctaaattattgtgacgctctgctacctggaatcctgctttattcagatagtcgtaaaatttctctgcactatagaaacggctgttaccgtttgccatgcaggtaaaataaagtgaggatgcattcaggctaaacgatgtcgcttcaaaccgctgtgcatcccagaacaactccatgatgcaaagttttgcgccaggcttcattacgctggcaattttgctgagtatgctaattatttgttcgggtgaaaaacagtctaaaaattggctcatccaccagatatcagcctcgcctggtaatggtgcatcgcttagcatatccaccgcatggaaatctatgcgatcagaaaaacctgcattcgcgatattttctttcgccagtacgatttgttgtggcagatctaataacgtaacggcgatgttttcattgaatttgcagcagcgcaaagcccacttacccgtattgccacccacatcgtacaaggttgtggggttgttggcgaatacataaggcagtgcggcgttaaatgcgccatctgaatagtaatgatcaaacgcaaaccagctatcacgtgcggcgtctggtaattgcgaaagtgccggatatatcgtcggccagtcgccaaatacttttaacccggaaggttttccttcattgagtgaatcggcaaggaagaagagcccctggtaacagacatcctgggtgaaatccatattcacgcgagtcatagtgtcatgcaggaggtaatgaccgattttcgccaggtaataaattccctctttacaggtaataattcgcccgcttaagcccatatccagtaacacacccacggcatattcattcaggactgtgtgctcagtaatcgcattaaggggagctccctgtttaccctgttgatccaaataatctaatattcctgcattgcgcaggcacaaagctgcctggaaaagcataggagcaaaggcaatccgctgtgcttcggtgatggcatccagtgcgctgagcgtgtcctgttcgtacatatataaccattcttatagagaaagttaaatactatcgggccattccagcccgatatcagcatcactataacgttgctcctgtagataagttaacctgtatatctttatccaggttacgcacccagcggttatagtttttatgaatttttccatcagaagcctgcagattcaggctactgtcatatttgatgttatagtaggtagctgtatatgtaatacgaacctctgcaacgtgatttcgtgtttgatagcgagctttaataactccaggggacacttgcgtcataatccacttgcgctgcgcacctgctttcaaaatggcatttttaacctgctcctgagtatgacccacactgacagtggtgcttatctgttgcactggggccgtacggacacaggcactcaacatactgataaaaattgtgatggcaaaccattttatataacgtttcattagtgcctcttatgtatgcaatacaattatataattaaatagtaataacagacagtatatctgtataaatcccagacttcttacccgaaatatatttggggttatattggattgtcaatgtctggttgtgacagggaccaaagatatgccggtatcatttttgtaaatggcttgtgaggtggagagccctctgcggtaagctccctcgacattccttttttatttatccgcagatattcttattctgatattgataaaacacggggtatggattgagactgaacagcttgttgtgcccggttttaatggtaaatgcatatgtgtcccagaattgatattgacttcctggtactcaatattctgaaaagctgaagaaagatcacgtttttgacatttttttgatgtcttgtcataaaactgtttcatgacagactttttcaggtgtaaattttctcgctgacactttttgacatgaatttacactggcatcacacaggccagaatacggggagaacatgcagcgccggcagaacaacattctgacgaaaacgtcccttttatcccgtgcgttgtctgtcccctgttgtgatatgttccggcgcggctctccgtggatatgctatctctccctctccgttttttctggtttttttatccccgcattttcgtctccggcagccatgctgtctccgggtggccggtaccctgctgaacagtgcgctgatttatgcggggaataacctgaagctgtttacagaccgtctgcataaccagcatggtgatatcctggccgacaacagtctgtgggtacagaaggacagcagcgggacggcaaacagcgaaatcattaaccgttccggtaatattgaaaccatgcgtggcgatatcaccatgaatacggcgcatctgctgaattcatgggatgccatttcggccagccatgaggtcattccgggcagcagccgcggggtgatttcaccggttccggaaaataaccggtggtggggtgttgtccggcatgatggtgtggaatatctggccgtgtactggggtaagggtgccacggtacctgatgaataccgtatccgtacgggagatacggatacggtgacagtcagtgccaccggccatgctgccaggatatccggcggcgctgatatgcatatccgtgcaggacgactggataatgaggcatcgtttattctcgccggtggcagtatgaccctgagtggcgacacactgaacaatcagggctggcaggaggggaccaccggaaaggaaacggtctggcggcttgcctccgactcactccccaaagcgtggtttactgagccatggtacagggtctatcgccaggtctcgccggatgcgacagaagccagtggcacctctccggtaggtcagtaccgtgcggttatcagcgctgccggtgatgtgtctgccagctttgccactgacaccggtaataccactgtcatgccccgggcaggtggttcaggtaacacgataacggtgccttcgctgaactccctgacaccaccgacggtcagtcagggggtgagcggtgaagccctgctgaatgaaagcggtaccgggataaccggccctgtatggaatgacgcgctgccggatacgctgaaggatatcccgggtgcgctgtcgctgtacggggcaagtgtaagcagctatcccctgccatccggtaacaatggttattttgtcccgtccacggacccggacagtccgtatctgattacggtgaacccgaaactggatggtttcggaaaggtggacagcagtctgtttgccggactttatgacctgctcaggatgcaacccggagaggcaccacgtgaaacagacccggtgtatatcgatgaaaaacagtttctgggctcatcgtacattcttgaccgtcttggcctgaaaccggaaaaagattaccgctttctgggggatgcggcttttgatacccggtatgtcagtaacgtcatactgaaccagacgggctcacgttatatcaacggcacaggctctgacctgacgcagatgaaatacctgatggacagcgcggcagcacaacagaaagcgctcggactgacctttggtgtgtcgctgaccgccgggcaggttgcacaactgaccagaagcatactgtggtgggagtccgtcaccatcaacggacagacagtcatggttccgaaactgtatctgtctccggaagatatcacccttcataatggcagcgttatcagcgggaacaacgtgcagcttgcgggtggcaatattaccaacagcggcggcagcatcaacgcacagaatgacctcctgctcgacagcacaggtagtatcgacaacctgaatgccggactgataaacgccggtggtgcactgaacctgaaggccatcggggatatcagcaatatcagctcagtcatcagcggtaaaaccgtatccctggaaagcgccaccggaaacatcagtaacctaacccggacagaacagtgggcgatgaacaacggatataaccatttcagcggaacggataccggtccgctggctgctgtcagggcaacggactcactgtttatgggcgcagccggggatatcagtatcaccggtgccgccgtttctgccggtgacagcgtgttactgtccgccggtaatgacctgaacatgaacgcgatacaggccggagaacgtcgtcgctatggcgggtccgggtggtatgaaactcatgccgtggcccccacggtcactgccgggaacagtctgatgctttccgccggtcgtgatgtgaacagccaggctgccggtattacggctgaaaacagtatggatatccgcgccggacgggatgtgaacatggctgcggagtccacaggcgcaggtgaccacgacagcactttcagcatgaagacggttcatgattcggtccggcagcagggaacagacatgaccagtggcggtgacatcacggttactgccggacgggatatcacctcagttgcgactgctgtaacggcaaagggcgatatccgtgtgaatgccggtcatgacatcgtactgggtactgccacggaaagtgattatcactacagtgaatcaggggaaacccgcaaccgtctcctcagccatcagaccacccggaccatcacggaagacagcgtcacccgtgagaagggctctctgctgtcggggaatcgcgtgaccgttaacgccggcgataacctgacggtagagggttcggatgtggtggctgagccgggatgtgtcactggcggcgggtaatcatgttgatgttcttgctgccaccagtacagatacgtcctggcgctttaaggaaacgaagaaatccggtctgacgggtaccggcggtattggtttcaccattggcagcagtaagacatcgcacgaccgccgcgaagccgggacaacgcagagtcagagtgccagtaccatcggctccactgccggtaatgtcagtattaccgcgggcaaacaggctcatatcagcggttcggatgtgattgcgaaccgggatatcagcattaccggtgacagtgtggtggttgacccggggcatgaccgtcgtactgtggacgaaaaatttgagcagaagaaaagcgggctgacggttgccctttccggcacggtgggcagtgccatcaataatgcggttaccagtgcacaggagacgaaggagagcagtgacagccgtctgaaagccctgcaggccacaaagacagcgctgtctggtgtgcaggccggacaggctgcgacaatggcctccgcaaccggtgacccgaatgcgacgggagtcagcctgtcgctcaccacccagaaatcgaaatcacaacaacattctgaaagtgacacagtatccggcagtacgctgaatgccgggaataatctgtctgttgtcgcaaccggcaaaaacaggggcgataaccgcggagatattgtgattgcaggaagccagcttaaggccggtggtaacacaagcctggatgccgcgaatgatattctgttgagtggcgccgcaaacacacaaaaaacaacgggcaggaacagcagcagtggcggtggcgtgggtgtcagtatcggtgcaggtaaaggtgccggtatcagcgcctttgccagcgttaatgcggcaaaaggcagggagaaaggtaacggtactgagtggactgaaaccacaacagacagcggtaaaaccgtcaccatcaacagtggtcgggatacggtactgaacggtgctcaggtcaacggcaacaggattatcgccgatgtgggccacgacctgctgataagcagccagcaggacaccagtaagtacgacagtaaacagaccagcgtggctgccggcggcagttttacctttggctccatgaccggctcaggttacatcgctgcctcccgggataagatgaagagccgctttgactccgttgctgaacaaaccggaatgtttgccggtgatggtggcttcgacatcacagtgggtaaacatacccaactggatggtgcggtgattgcctccactgccacaccggataaaaaccacctggataccggaacgctgggtttcagtgaccttcacaacgaagcggattataaagtcagtcacagtggaatcagtctgagcggtggtggcagcttcggggataaatttcagggtaacatgccgggtggcatgatatccgccggaggtcacagcggacatgcggaaggaacgactcaggccgcagtggcagatggcacaatcaccatccgggacagggacaatcagaagcagaatctggcgaacctgagccgtgaccctgcgcacgctaatgacagtatcagcccgatatttgacaaggagaaggagcagaggcgtctgcagacagtggggcttatcagtgacataggcagtcaggtggcggatattgcgcgtacacagggagaactgaatgcgttgaaggccgcgaaggaagcaaccagcgaaacacttcctgctaatgcaacagagaaacaacgccaggaatatcttgcgaaactgcgtgacacgcaggcttacaggaatgaaatggcgaagtatggtaccggcagtgaaattcagcggggtatccaggccgcgacagcggcgcttcaggggctggcggggggtaatttagcaggtgctctggccggagcttcagcaccggaactggcacatctgctgaaatcaacagaaaaagacccggcagtaaacgccattgctcacgccattctgggcggcgcagtggcggcaatgcagggtaataatgccgctgccggtgcagcaggcgcagcaacgggagagctggcagccagagcgattgccggaatgctgtatcctggcgtgaagcagtcagacctcagtgaagagcagaagcagacgataagtacgctggcaaccgtgtcagcagggctggccggcggtctaaccggaaacagcaccgcatcagcagcagtgggagcacagagcgggaagaatgctgttgagaataactcactcagtgctggctggaacaatatcctgccatcaggaacacaggattacggacaggccgtagcctcgtggaatcagtatgctcaggacaataatctgacaccggagcaggttcaagaagggatgaatcgtatagctattggtgaagggccttcttgggggacaacatataaagtacacccggtagttcaggctggcggtgatgttagctttatccggggttatactttaagcggaactatagatgacaatcatatttcagttaatcaaggggatatttatagtataggtgctcatggcggagcctcgatcggattatcctttggcccgtatttcccgggattaataaattcaaatgataacgattattcgataaatggtggttttggcgttggtgcagtggggctttctacgggtaaagatggtgttagtttcacttttggttttggcccaagttggggttggagtgcaactgaaattaaaggcgttgacgttaatggcacttcaacaagtgaggtttatcgatatgattttaaataatttctatagtttactatttttattgatgcttgcgctgtcaatattttccttcacagtgctatttgctttgtttatatataaagatctcggtggtgtaaaatttgcccgggactcttttttgttttttgattatatattttttagttctgacatgagagcaaatgcctctgcactatcggttatctgtgtttttatatttggattggcttttgatcataatcgtaatccacttgttaagaattacttgatcgatatagtatggtttttaggtgttgttttattttttatacactgtcgttttttttctaatctggaatatggtaagacaaaaattatttttgtaagagagctttttttcaacctaaaaataaaactaaggttaatatttttatggttgtcacgattattattcatcatattgatattaaatcgtttttatcgttgatttgttgttgagaataatttacttggcggtagtgaatatgctcattctgcgtggatacgccagcatggtatcgacatggcgacatgtacagaaaactcttccggtgccgcctgccagaaagcaatgaatgagagggatgctgtagggctggctttctgcgtggatacgccagcatggtatcgacatggcgacatgtacagaaaactcttccggtgccgcctgccagaaagcaatgaatgagagggatgctgtagggctggcnctggcaacaggtactgtggcactactccccggtagtgctcaggctatgtggggacttggagcaagtgcgaatgctggtatcagttatctggctgatggtactgtagatccggcaaacgcagccattgcaggctgggtgaatgtgttcagcatgggtaatggcctagcggggactgtgggctggaatgctgcaggtggtgcgctgggtaactggatcggcaacaaagatcctctgtctggtgcaatttcaaatggtatcggttctgctgccgggtatggtatcggtaaaggtattacttaggggacagataagattacgaatgctgtaggaaaatgggtgacaaatggctgggatcctaagtacgatccaacatggataaaatatgctgaagtaaatcgtaacgatatcattcgagaaggcatgaaaccgagcaatattcctggaactgctggagatattggcggttctataggatccgagctaggtggaaaagtaacagataaagtatctgaggaactcaagaaatgaaatattcttttcgagtggtaataggtaagtttattatatgcagttcaattctcttattgtgttttattggcatgatcttagcggccataataactaaactaacgtttgtagcgttagcatggtttcaaagcgggatttttgaagttttgtagagcgatattgtttatgctgctcagttgggtggtctgggggggggcatattaggtttttgttgggttttgttatatctttttagggcaaagggctttagttgagaataactacctgagcgtgtctgaaaagacagaacttgagatagcaaaacagacgcttaaaaacagtaaagatccggcagaacgtgaaaaggtacagcagaaatatgatgcattgcttgaaaaagatattgccagtgataaggaggttattgctgcctgcagtaatggtaatgcgggtagttcagcgtgtgctagcgcaaggctgaaagttattgcgtcgaaagaagggtacgaagatggcccttataactcgaaatacagccagcaatacgctgatgcgtatggccttctgccagcgctcgtttttccagagcgtgccattcagctccaactcgtgtcaggcgtagtttacgcaggctgcgttcaaggtgatggatattgctcactgcgaacctcccttgccacgcagtagttgctcataactgctcaggttatgctgtatcacattgactactggcaacgccttttcctttatacccaggaagcgcatcagccggtgcagatccacgtttcccgggggattcaacatctgctccataccttttgccacgactgagatatcgtcgtatcctgcagccagtttcagggcatgtaccatcagccttcctgccatgtcggactccagatgattacataagcgacgccacagcctccgcaattcatcgtctggcaggatgtcatttctcagcgttgcatggcagaacgcaccgggcttttttgccagactgtcgatcacatgtcggaagtcgatacgacgggcccgcgtcttccctttttctggtctgacacgagggcagctcatgacctcgctgctgccaacgtaacggctcagacgatcgtcccataaccggacccgtaacagttgacctacaagccgggaaggtacgctgtagacgatgtgcttcacattgatggtactgctgcggctaaccctcacagtcagcactgcgacgaagcggcagcggtttcagatgaagacgttcttccttgatcagatcatgattgttacggttgtgccgcataacctgctgagtgatgaaggcctgatattcttctatggtgctgaagtcgttactgccccgcagtatcagcgcctgacagatacgccttttcagatgcccgtgggcactttcaaccgagccattttcgtggccccgaccggaattattatgtacgccctgcattccgtagtgctgacagatagcagtataacgctcagtcagctcgcggcgtccatctccgcccagttgtccgagggcttcctgcagaccttcagccagagcagagaagctcttaccacccagcacaacccgcatccagctccagtggctccattccagacggaagtgatacaacttaccgacgatggtgacaactacacctttcagttcagtaaagtccgacaggcctcgcagaccgggctgatgtcgctggcggaacatgacctcctgctctgcactatactgtagcttccattcgcgaacccgccgttgcattgttcttcgaaggctgttgggatactggccgggatatttatcctgtagcatctccagcagagttgttggtgtcagagccggcctctctttcaacagaggaacaagcatgctgtcccacatagcttccagaggaagctttgcgtgtgcgccagtgccgaacactgttgttttcccactctcctttttcgatccgacgaccagaatggactgagataccagccttcatggccgagatatgcggtcggtcaggtggtatttgaaaccagactgaagcccacggtcgtcatcgggacgcaggccgccgccgtgcatggtatcagtgagcaggcactctgcggagcaccatcatggactgatgtggtgcggcaactgcgtcatgcaatcggggaccgaccagtaattatctttaatgcccggttcgacatccgcattctgaaaaagactgctgccgcacatagcgatccggctgactggctggaagaactgacggtatattgtgtgatggagctggctgcaggatattatggagcctccaaccgctatggcactatttcactggcctgtgctgccagccagaccggactgaactgggaagggcaggcacactcagcgatcgctgacgcacggatgacggcaggggtggtaaacgctattgctgcatatcatctggaactgctgcaggaacaggcacggctgaaaacctgactgcctggcctgtataccgcaatcatttacgttatccagacgtaaatatatcaataaatagcaatcccccagatacctaatgtagttccagcaagcacggccgggcagcttgttctgcctgcgttttcttcaattgagcagtagaccatttagctgtggcatgaatggctgcagaactttcactgttgctacctccagttccaccaccgctgccagagccactcccgtctggattatcattcaaaagagtaatgattacctgccccttatcatcataaggaacaccatctttatagtacgctacagctgtttccattataaaatcctctttgacattaaaaacaatcagttaaaaataagtactgcatatataattactggttttatatacagcataaaaattacgccgctgcgttttccctgtcaaccctgtggattttcatttttgtgaaaacgatcaaaaaacaactactcacaattcgacagtcccgccagataccgcaaaaccggccagacgttaccgttttccgggaccatgatatgagccccgttggggagggtatggagttgctgaaaatgacggtcagattgagttcaccgttttattgttacaggaggccagggcttgtctgctaccggtccggacgagagggataccgggaatttgaatccggttaactgagccggacatacggtaaataaggaatgcaggcagaacgggagtcactgcaggatgagaccggcactacagcagaaaaacaggtgattctggtacggctcagccactaaacacagttggaaactgatgataagatagtcagcggttatataactcactgagtaaaaagatataaaggtaaggagacactcatgagtcgttccggtagcacactgtatcttatcgccctgctgacagcggcaacggtcctgacagcctgcacgccaaagggcagtatggaacaacatacccggcattacgtttatgcatcagatgacggttttgatcctaacttttccacccagaaggccgacacaacacgaatgatggtgctttttttcggcagttctgggatatgggagctaaagataaagcgacaggaaaatcatggagtgatgtgcaacaacgccttcagcagtttcacagccaggaatttttaaactcactccggggcacaactcaatttgcgggtaccgattaccgcagcaaagaccttaccccaaaaaaatccaggctgctggctgacaccatttcagcggtttatctcgatggttatgagagctgacagtgacggggaacgttgcgggggaataaagatattgggggtaggctgagccccagaatatggtacctccctgcccctccaatattcggtgatggccggacaaggagtccaggagagggggattagtggtggatctgcgccaggtcgtcttcagtctttatgacgctattacggtcaatgccgttctgcagcatggtacgggtaattttcagagtggcttggagctcactttctgaacgacttattagcgtgtgctccggtgatttgcacatgcgcaaatctttcagcccaaaggaggctaatcatcacggcgattacgttcaaatcccccgcgccctcttgctgccaattcagcattgagtaccacgtaacgctcccagcgttcacgcaactgtgcgagctttagcggtaattctttggtgacaaaggcttcctgtatttcaaagtcatcaagatgcccttgcagatatgcatgtacgccttccaacacatcagtcagagtgatgttgttactttgttgcctttcaacaagcggcccctgccagctatgccagaaggcctgatggcgcagacagctttcgtcattcgcgagcaaccacaaatccataaagattcctcgtgcaactttgaacggctatttgtcaacgacggatgaaaagtggctcttccgcaacttgggtggagattttcatgccagtggactcatgaccctctgcctgagtagttcaaatccggctctaccatacatctggcgttttagcatcttcaggcgatttacatgaccttcgacaacaccattactccagcggctactgattgcctcacatatagctgcagcatcagcttccatccccgccgccacgcgccgaaattctgctgaaccgctttcgtggactcgagtgaaccagctacttagctgtgatttattttgggttttcagaatacggtagaactcgagtgccagttgctgcgctattttcagctccggttctttttcacacatcagactaataaatcgggaagcataattttcttcatccctgattattctccagggcatcaaccagcgccttacccgggacattgaaggaagtctgacggcagtagtaaccggtgggttccagcctttacgccatttggcaatagcatccctgacaatggtttcactgcctgtaaacccccggaccaccatttcccgccattatccggctggcgttataattcccactttctcgttgctcttttaaccactccctccatgggtccagaagccctcgctttggaggtcgggttgacatttcagggaatgttcctgaacgtacccagcgactgactgtcacacgcgacaggcctgtaatacgggatatttccctgaaactacatcccttgttatgcagggccataacctctgtccaacgctgatgccgttttttgcggggttgctgttttaggtgttccggacgacggagcgatgctgcaggcacagatggttctggatcaggtgatttctttggtgacaactcactggcaacaagacgtatcagaggcatatgtcggtacatcattcgttcaggcgcatcgccaatattttttagcaggtgccatcgatcggccacctgtctggcctgaggtgcaccttcacgtgctgctgttgcatagactccactgcgatcacgcgagacaacctgtatttccggatattttctgaaccaggtcgccagcgtacgctgatcacggccgggaagcaggacgaggggacggtgagtatcaagattgacgattaacgtactgtaacggtggccccgatgccacgcccactcatcaataccgacatgaggcgcgcctgactgtttcgtctccggggtattgataaccctgcgaagaagagtatcagcactgcaacggagacccactgccgttgcaacccgtttcccggcctcacctccggctattaatcccagttgacgttgtaaattttgtaacgcctgtgaagactgctggtgtgaaccggcgaagggagcaagcgacccggcaaaaattttacgtgaacaagccgggttacggcagtaccagtggcggacggaaaatacaagccatagcgtatgcccttagcagggtagatgctgtatccggcgccgacgacaactatgaacagagtcgctacgcttaaagcattcaggacattgtgcagtttttcgttttccgtggagatggagggttataccgtcagagctaataatttgtcgactgcatcgccatccgcaaggtaactgtagaagtgtcttaagagagtgcattgagttgcccaaaacttaaaacagcttagatctttgttcaccagaaagtttcatccattttcttccactcaggttgcagaagaaccacttttgcaccgttcgtgacattaatctttaaaacggcaaggtcaatacccagttgttccgccactattgtgataacagccttcggggggagcttttctgtacgcagtgtgcgaccgagagcacggacaagtgcaagctgaatggcaaaaccaagacggttatgagaccgccgctgagctctggcaaatgcaatattttcgcaggagagtgctcatcggggaattaaagttcaggtaatccaaaaagcgtatcgtgcgagtttgtcacgcaagaaatcacagatttatagattcaattttcttcaactgtaggaccttacggaaaacaagtgatttcaaggtgaaaaggcttaacgtgagttatcgcagaaatggttacggaacatcctgtattgtcaaacatgcattaaatgattatcattatcaattagtgtgtgcaatagatggttaagaatagaactttcaggagatacaatgcagtcagtcagtaaatcaatctaccgagggaagttgcttagcagtttacctgctgtgggcgagattcataaagaaatcgcagtatcagaagaaaccgtaacatggatctctctgcaacgagagattatagcgaatattttgctgggaaaagatcctcgcttgcttgtgattgttggtccatgctcaatccatgacgttcaggctgccgttgaatatgcgaaacgattgtccgtattacagaataagtacttatcgcaaatgtacattgtaatgcgcacttattttgagaaacctcgaactcgtaaaggctggaaaggaataatgcacgatcctgatctaaatggaagctataatgttgagaaagggatacgatatgctcgccagtgtttgtcctcaatcacaacaatgcgtgtcgcaaccgctacagaattcctcgatcctttccttactccctatattgctgatttaatatgttggggggctgttggtgccagaactactgaatcacaaacgcatcgtcaacttgcgtctggtttacattgtcctgttggatttaaaaacagcactgatggaaatattaacttagctattgatgctattcttgcagcccgtgaacaacatgttgtatatatgacatctttaacaaaatgtatatctaccctattaaccgatggcaatccacatggacatctcatattacgtggtggtagagagccgaactatggtttgtcggatataacgaaggcagtgaaattaatgcatgatgaaggtatcaatcatcgtctgataattgactgtagccatggtaatagtggtaaagtggctgaacggcaaatctctgttgctcgtgaagtcattgataatcggaaaaagatgccgggatatgtagctggaattatgctggaaagctttttacaaggtggaaaacaatcagacagccttccgcgagagtatggtcagtctgttactgatgagtgtctttcatggcaacagacagaacaattattatcaactctggcagcacaactttaatttcaactattcagtatcattttttaagggaaaaatgaaattatttatcttaatacacccaatctgggcatcaaagaaacagatgttttatctgtacagttcattgttggaagggaaataaaatatgacatgaatggcagaagtgttatcactctgacattaatatttttattaggagttgcagtatttctaatataccatctccaatggatgtatcttccagggtattatctgtggggcctatgtgtatgtatattgtcaaaccagttagctcttatgcttcatttcctagcccttcttggcaaatgatactgtacttgcgtaggtgtcatctgtgacatggttgcggtgctattttgtctctgttggcttaaaaagagtaattaagactatgataaaaagttaatttccaaagaacacgatagggcgctaatcaataatcggatgcatgctaaatcatattttataatatgtctgtggagatgatgctaaagtcatcaatagttcttgaggaattcattatgactatcattggtatcgttcttgccagaaacgtcttcgctgttcacaatgttgcgttaaatgagaaaatgttctggtaaacccccggagagcacatgcagtgctgccagccctgattgtacttttacctccctgagttatgggtaccttgctaagggagtattcaccagtgaacaacataatacaaagtagcgtaaaccttttgttcaaggtcagtcagggtatctcatcggaatggtgtgcaatttaacatcgctgcccagcatgagttgataggcgtgaccgtgatccgtaccgtgggatgtgagtttcatacaggtaatatgatcctacccacgtaatgtggacacggtcctaagcgagattatggttttcaaattgttccgggctgagaccgccacaggcactgtgacgacgccagcgattgtaatcacactcgatataattaaacaccgttgcccgcattatttcccggctgctaaagcgttccccgtggatatattccaccttcagcgaatgaaagaagctttccacacaggcattgtcataacagtagcctttcgcactcatactgccacgcaggttgtgtcgcttcagcagcgcctgataatcccctgaacagtattgaccaccacggtccgtatgaacaatgacgctttccgggcgtcttctccgccacaacgccatttgcagtgcatcacaggccagttgtgctgtcattcgcagtgacatcgaccagccaatgacggcgcgtgaccacaggtcgatgactactgcgagatacaaccagccctcatcggtacgcaagtacgtgatgtcacccgcccacttctggttcgggccgctggcgctgaagtcctgctccagcagattctccaatacgggcaggccatgtgcacggtagctgaccgggctgaacttccggctggctttcgcccgcagcccctgacgacgcaggctggcggcaatggttttaatattgaactccggcatttcgtcagcaaggcggggagcaccgtatcgctgctttgcctcaaagaatgccttatggacagcggcatcgcaggtgagccgaaactgttggcgcaggctcatctggtgacgacgccagagccagacataccagccgctgcgggcaacccgaagtacacgacacatcgctttgatgctgaactctgcccgatgattttcgatgaagacatacttcatttcaggcgcttcgcgaagttgtcgcggccttttggaggatggccagttcctcagcctgctccgccagttgtcatttaaggcggacattttcagcggccagttcgctttcgcgctctgacgaactcatttgttgctgctgtttactgcgccaggcataaagctgagattcatacaggctgagttcacgggctgcggcggccacaccgatgcgttcagcgagtttcagggcttcgttacgaaattcaggcgtatgttgtttacggggcttcttgctgattgatactggttttgtcatgagtcacctctggttgagagtttactcacttagtcctgtgtctactattggtgggtaagatcaaaacccattcatacctatagaaaaataggttgttttttctaacgattgttgaaggggaggtggatctgatgaaaatgcagcggatgttaatattaacatcatacttattataatctttttcgtaagatacatactttcccctttggttttccatcgataaatgttcagataaacaatatatgttttttcttgttaatgtttatatcgatggttttataacatgaaatattcagcataataatcaacaggcttgtacctgatcaggtatcagtttgcaaaaatgtttgttataggtcatgaccgcaaccaggacacataatttcaccacaaccacaaatataatcggcatcatagtcatgtgttactataccggaagccgacttattatttgtgatacagtgtgtctcctgctctacggaggattctacctctataggaaaattatcgtgttttcgtcttgaattgtcttgcttgttgcctttatcaaaggtaacaatgaattcttcatttctgtgattattatcacaattcattcttatgcctcctcacatttcccgatgtatgaccgtcagtgctattagtgtgcgttcaagtctcaggttatacatgagcgacaaccatgagatcctgactaacaattgcatcagtgacataacgtaaaatacctcttgactttatatggacaatatgacactttttttgaaaagtaaataacaatcattctcttttgtctttgtctgggtgaggtcaggtaagatggaatttgctacaaacagagtttctgtaaatgacagtcggtcagcactgtcatcaactttgctgttatctttgatcatgagcgccactctactggaatattctttatcgatgacctgactctcctgactgaggtgctaagatttggtaacttttcataatgaaaataaagcaacaggtaggtattaatgagttataaaaaactgtcccaattgacggctatattcagtttacctattactatcttattggtttcactttcatcccttcggattgttggcgaagggaattcttatgttgacgtttttctaagctttataatatttcttggttttattgagctgattcatgggattcgaaggattctggtctggtcaggctggaaaaacggaagttaaatatgatggagtttatatgcgagaaataacagaatcacagttaagatatatttccggggcgggaggtgcgccagcgacttcagctaatgctgcaggtgctgcagctattgttggagctctcgccggaatacctggtggtccacttggggttgtagttggagccgtatctgccggtttgacaacagcaattggctcgaccgtgggaagtggtagtgccagttcttctgctggtggcggtagctaattatatttttatttattttacaggtactttttcggtagtacctgtaaaatatatcctttttgtttaaaacagatagaagatccatttataagtgtgtttttatgttcaacactttactgatgaagatatgatttacagtcgttgataaataattttttaatttatgtgtaattaatagagttttattgtaataaggaagaagctgtcaggacacttacttgctcttttatgaacactcttttatgaaaattgaaacggagaatactgccagatgagtcatcagtgttcactttctgaactgaatgaaaacctggtgcctttcactgccaggcagatcaagtcctcattaatctggtgtgcagaggatgtcagaaatccagacgagctgcaaaatgcctgcagttatattatcgatcctggcagtacagcttctgccaaagtgttccatgcagagcgctatggtggcagtggtattcagcgtaatggaggtggtgcacgttgtgggtttgatggtaactaccaggttaaaggaataggaagtaatccgttggttggcgaaggtactgacgaacgtcattctaatggtgcactcggcgctgttcatgcaatatatgaggctttgtggggagaagtactggctcaaatattaccttatagtgctgtgcgggttcgggcggttttacttacagatctctatactgaaaaggcatttgagcgctccggtaggaaatcacgaagagccctgttggtacgtgagcctgttgttcgcccggcgcattttgaacgggcaccttacttccaagtaaaaccggagtattccagtctgttaattcacgatgcctgtcgggttagatctgtgatccacaagctgccaggatatctacctgtaccaccggaagaaattgatgctgaagcacgaactgatccccggatttattgcattgaggggttatgtgaactggcacgtcgtgaggcctggcaaatggcattttgtcgaacacgtttcctgagattgacaacttctccttctaatattgcaatggatggcagattaatggattttaacggactcagttgtctgtttccgggagattccccagctgattttgggtataaactaagattagctgaactggcaaaagaaccgatggtacttatgcaagggctgtctgatctctgcttgtatatcggaaaatatatgtttgaccctgacttcactcttgcagcccgtttgaaggttgaggagatatttcagaaaacttttcatgaagcatgttattactgttatctagaactgttgggtattcctggagaatttataacacaaaaagagatacctgatatattgaaagaactggttaacagttttgttgcattactcaataaatactacgagaaatcacatgcccaagatattgtcaatcaggatggttcaccattgcaaaagttggttgtgacgctaatccatcataggcataatcaaaagcaggcactgaatagtagcatcaagaatgatgtttatttcaccgttgcacaacagtgtttttcccaggccatccactggctgacgcaaggcagtaccagacgtcagataaatgcctcattactcctgaaagaaattgaacatcataccatgaaaaggctgcaacccagggaagagctgaggaaagagaatatgtgcgaaaaaattgccatcctgctggataatcatggcgatgatcccctttttttacaagaagcaatttctgatatgaaaaattttatgcttaagttttccagagatgcatttggatatcttgaaccgataagaaacacagtgtaataaatatataagggaaatagtaatcatgtcttatataagggaaaccatcagaggaaaagatgaatggactgtttatgaacagatcggttttgcggtcagttgtatgctctacaatcgtaattacagtctgtatccggtgttaaccattcaatactggactgaatatgcgatacagcataatcagattaaattcctgtttgattcacgaggttttccactggcgtatattacctgggcatatcttgaggctgatacagaagcacgcctgctcagggatccagaattcaggttgcatccgtctgaatggaatgaagatggaaggatctggattctggatttctgttgtaaaccaggctttggtcgaaaagttattgactatctcatacagcttcagccatggggagaaggagaagtacgatggttaagcaggcgaaagaaaattgtgacatacatccctgagcggctgcataaaacgtagtacctctgaagatacagagataattgtaaattacggggtaaatgcatcgctgatactattttgacaggactctgtattttctggctttgattatagcatttcggttaaccagtgaaggtattacaggaaaagtgtgagtaagaggagctattttgtttcgtcaggatgctttagaaaacagaaaaatgaagtggcagggacgggcaatattacttcccggaataccactatggttaatcatgctgggaagcatagtgtttattacggcatttctgatgttcattattgttggtacctatagccgccgtgttaatgtcagtggtgaggtcacaacctggccaagagctgtcaatatatattcaggtgtacagggatttgttgtcaggcagtttgttcatgaaggacagttgataaaaaaaggggatcctgtttatctgattgacatcagtaaaagtacacgtagtggtattgtcactgataatcatcgtcgggatatagaaaaccagctggttcgtgtggacaagattatttcccgtctggaagaaagtaaaaaaataacgctggataccctggaaaaacaacgcctgcaatacacagatgcgtttcgtcgctcatcagatattatacagcgtgcagaggaagggataaaaataatgaaaaacaacatggagaattacagaaactatcagacaaaagggctgattaataaagatcagttaactaaccaggtggcattatattatcagcaacaaaacaatcttcttagcctgagcggacagaacgaacagaatgccctgcagataaccactctggagagtcagattcagactcaggcagcagattttgataaccgtatctaccagatggaactgcaacggtacgagttacagaaagaactggttaacactgatgtggagggcgaaatcattatccgggcgttgactgacgggaaagttgactccctgagtgtcactgtcgggcaaatggtcaatcccggagacaaccttctgcaggttattcctgagaacattgaaaattattatcttattctctgggtcccgaatgatgctgttccttatatttcggctggtgacaaagtgaatattcgttatgaagcctttccggcagaaaaatttgggcagttttctgctacggttaaaactatatccaggactcctgcatcaacacaggaaatgttgacctataagggagcaccacagaatacgccgggcgcctctgttccctggtataaagtcattgcgatgcctgaaaagcagattatcagatatgacgaaaaaaacctccctctggaaaatggaatgaaagccgaaagtacactatttctggaaaaaaggcgtatttaccagtggatgctttctcctttctatgacatgaaacacagtgcaacaggaccgctcaatgactaacgggaatttcagacaaattataaatcagcttgatatgcgctggcgacgtcgtgttccggttattcatcagacggagaccgctgaatgtggactggcctgcctggcaatgatatgcggtcattttggtaagaatattgacctgatatctcttcgtcgtaagtttaatctctcggcccgtggagcaaaccttgcaggaatcaatggaatagcggagcagctggggatgatcacccgggctctttcactggagctggatgaacttggtgccctcaaaatgccgtgtattctccactgggatttcagtcacttcgtcgtgctggtcagcgtaaagcgtaaccgttatgtactgcatgatccggccagaggaagaagatatctcggtcgggaggaaatgagccggtattttacgggcattgcacttgaggtctggcccggaggtgaattccggacggaaacccagcaaacccgcataagtctccgttcactgattaacagtatttacggtattaaaagaacactggcgaaaattttctgtctgtcagctgtaattgaagcaatcaatctggtaatgccggtgggaactcagctggttatggatcatgcgattccggcgggggaccgagggctgctgacgcttatttctgctggcctgatgttctttatattgctcagggccgcggtgagtatgctgcgtgcatggtcctcactggttatgagcacgctcatcaatatacagtggcagtcgggtctgtttaaccaccttctcagactgccgctggcattttttgaacgccgtaaattaggtgatatccagtcgcgttttggctcccttgacactttgagggccacctttaccacctgtgtggttggggcaatcatggacagtattatggttgtgggtgtttttgtgatgatgctgttatatggaggatatcttacctggatagttctcggttttaccatggtttacgttcttattcgtctggtgacatacggctattaccggcaaatatcggaagaaactcttgtcaggggggcccgggccagctcctattttatggaaagcctgtatggtattgccacggtaaaaatccagggtatggtcgggatccggggaacacactggcttaacctgaaaatagatgcgatcaattcaggtattaagttaaccaggatggatttgctcttcgggggaataaatacttttgttgccgcctgtgatcaggtggcgattttatggctgggtgcaagccttgtgatcgataatcagatgacaatagggatgtttgtggcatttggttcttttcgtgggcagttttcggatcgggttgcttcgctgaccagttttcttcttcaactgagaataatgagtctgcataatgagcgcattgcagatattgcactacatgaaaaggaagaaaagaaaccggaaattgaaatcgttgctgacatgagcccggtttcactggaaaccactgatttaagctaccggtatgacagccagtcagcacaggtattcagtggtctgaatttgtctgtggctccgggagaaagtgtggctataactggtgcctccggtgccggaaaaaccacattaatgaaagtattatgtggactgtttgaaccagatagtggaaaagtactggttaatggcacggatatacgtcaacttggaataaataattatcaccgtatgatagcctgtgttatgcaggacgaccggctattttcaggatcaattcgtgaaaatatctgtgggtttgcagaagaaacagacgacgaatggatgacagaatgtgccagagcaagtcatattcatgatgtgataatgaaaatgccaatggggtatgaaacgttaataggtgaactgggggaaggtctttccggcggtcaaaaacagcgtatattcattgcccgagctttataccggaaacctggaatattatttatggatgaggctacaagttctcttgatacagaaagtgaacgtttcgttaatgctgccataaaaaaaatgaatatcacccgggtgattattgcacacagagaaactacgttgagaactgttgacaggattatttctatttaaaatccactggtgtaactttgtaaggagttttgtcgatgggggaggtcaagaaggatataaaaataacagtgattgcttttgttatcaattatctgttcttttatattccggtgtcattatatcttagttattactatggatataatttttttaatctatatatgttttttttatcacttgtagttacatttttatcgttgtggttaaacgtgaatttttacttcttcacaaatcttatagcgaaggtgttgaaatgagaaaactatctgaaaatgaaataaaacaaatatctggaggtgacgggaatgacgggcaggcagaattaattgctattggttcacttgctggtacgtttattagcccgggatttggttctattgcaggggcttatataggtgataaagtacattcatgggcaacgactgcgacggttagtccctccatgtctccctcaggtataggattatcatcccagtttggatccggcagaggtacatcaagtgcctcttcgtctgcggggagtggaagttaaaccttatattgttaatgaagcacctgttacaggtgcttcattatatgataatggtgcctatgtaacgctttaagttaggctcctccgaacgtttattattttatgcataccgcatagtaacaatgccagtccgtttaatttttatcatatgagattgtaacagaaaatgctctgttaatgagtataactgatagaagccagatattgtattcctgctatgactgcattcatcgacatgtgaagtaatatgggcattaacaggccattcgactttatttttgcactaataagaactaacgataccagaaagagcatcaaaaatgtatgaaagtcagtatattgtagatgtaatgcagaaaatatgactgatgttacaatagcagaggtgtaaatattgtcattaaaccagaatttaaaagagttaaaaagacaccctcgaaatacaatctcttcatatacaggaacaagaagtacagaagaaaatatattaatccataaaatggctccggaaaaagacatttgcgagatcatccattcttccgttttcctcactgccagcagataagggacaaataactgaataatcattattaaagagaaaagagtaaaaaaaacatccagtcgaaaagaacctcttcctaatccttctctttttcggaagaaaataaaatacagtggaacaagaattagaaattcagcaagaaataatgctggaacaagaagtcccctggatataagttcctgcctgtttgtaagaaatgcaggaataaaggtaatagaaaatgataaagtaaacattgaaaagcagccggctgatgactgtttttttatagttgcatttttattttttgtcatttccatttatattcccttacttgttgtttaaaattcttttatataacaggaagaggtaaccatagaatgaacgtttattttcctgtatcagaacagccataacttttattttatagttgttatcagtgaatgaatgcaaactaatagaataatgagaaaaacaatggagaaaaaacgatggaccggacgccatagttcatattctcgtgtatcagcctcacgtatcaacctttctgaaatggtttcggtttccttacctcgttccagaatatgtctgtaatatttcctcatgacatataccgaaaactgaaaccagattaatatggatggacacacaacacataaacttctgatgatatcacccgggaaagtatcttgggcgggtaaaagaaaatcatatactctgaataaaatcatcatcgagataaatgagacgccagcacctatccagtattcgatatgggaagatgcagcattatatgcgtcagtaaaatttttctttcttaatgaaggtggaagtgctgaatgttcaggaatgctttttcttgtccagtatattttcatatagcaactcatataaaaagtgttctactttactatgatgatgacgatttataaaaggcttataatgactacttctcctttcattctcgaatatcacgataatgatagagataatcattatcaattgattgtgtcagtaattttgacttacatcacactttcatggtttaatcaggtgatttatttaatgaaaagagtgtgtttgtggatgtattgtgtatatgtcttaccgggcatctgttcttacattaattaatatattgctatttaagtattggtggtattgtcagtaacattcttttggttaatttagttattattcctcactgattaattgtccttccgttcttattgtttgtaacttgtgtttgtatcgtacctttcaggtgttgatgcgcgctttactgtgtctgcaccggcttgacaaaatccaacagggtttgaaaaggaagatttcgtgcaaataaccgaagccttaatttcagagccgggagacatccggcgttttgttcagcaggcggtggaccactggccgcatttgctggcattttacttcacactccattcggcagaaggaaacatcaacgggcaacagattcatgcattctgtactgccttttaccgacaggtgcaagaacatattactgagcgtaatcacactgccagtccagcaccgccggtggtattacgctggttgcgggaacaacatggaggagcaacaatacgatgcctgttgctgctcagccaggcgagcatttgccatctgcgggtcagtgccacagttgatgaagaatgttcgcaagtggtggatttactgcagcaggcctggcgggggataaacgctggcggacaatgtcgggtggaaaggtgttttcgggttacccggcctgatacatcagagcaatacgttgcgttaaaaacagctgttcagtctctgatgccactggttattgcaacaattatccggtgatgatcgggagaaatatcaactcttccgttaatttttacagactgataaagttttgtctgctgaatctttatacggaattcttttcagtatgtgtacacgaattgactctatggcggataaatactgttttaccttggcggaattaatcctcacgtcttcgccagcagtggcaggatgtcctggaggagtgtcggcagactgaggcggggcagaagaacggctgcatattacattgctgaatgtggattacgtcaccagttttgaactgccttttcgtctgcttttaacccggacgccacagctgattgttacacttcgggaagcatgggatatcagccagaaaaatgtggtgttcaacgataaacggtttggctgcgtgtacagcctgaaagccagtctttctggtgtgccggatatattccggtatcatctgtctcatcgtattcgccggatggttgggagtgaaaatacatcatcgccatggcagcaaattgcccgggaagtgaaagcgccccgtgaacgactgaagtatgcgctggaaacgggattgcaggtgatcgcactgaacggcctgttttggtcagacagtcagcgtctggtggtggatattctgaggctaagcgccaacagacgtgatacaggaaatcgtccgcatccccatttaccgtcttatatcactggcgctgacactgaaagcatggtcgtcagagactctgtctggcaaccaagggagcagaggccggaggtaattgacaggagccttgcgccgggttacgtatgttctccccggacagacagtctcagttcgtagaatctataaattactgctactgatgctgccggggaaaggcgtaacgaaaaaacagcctccgttaccggatagcaaggaggctgaatggagtttacaggatttgcttttgtataatgtctggccatgcagtaaaaccggacaggttttattatcatgtgaggtattctgacataaaatgctggatttttattttgtgacgaatgctgcaaaattgaatctgcactctgatgtaacttttatctgtttcagtgaagcatgcccacaaactgagttattaagttgtggaagaacagctctgtcccgcctgcatctctcctttcagaaaccagtatgttgccatgcctcgtcttaacggagagcgctgaaccataccttctttttccagtaataacaggtaatagcgtgcctggtaatccgttaccgccagcgcctccgcaatttctgcggttttccctccattatgtctgctcagaaaacccattatttcattctgcatatcatcatcctctctatataagcaaaaggataataagtggctgacttgtttttgacaattcaaatgtgatcatcatgtttttatattgtatttggtgtatttacttaatatgcgaaacatattcacgattggatttctatcacattatttttatagttttttcaatggtaaggaacgttgcaaaaaacgattttaacgatcttttatactgaatattcattcttatacagcattaatcactaaggcaccaatccactgcaagatataaccctaaaaataaacagctttacagatcaaaagatcgtcaaaatacatgtttacaacataaaaaactaaatatatcttaaggagccaggccctcctgtatgggggatgaatattaaggcagccctgtaggtggcggggtggggagtatcgaatggcacagcatgaagttattacccggggaggggatgcttttttactaaaattacgtgagagcgcgctgtcatccggctccatgtctgaagaacaattttttttactgataggtatttcctctattcacagtgacagagttattctcgctatgaaggattatctggtcagtggtcattcccgtaaagatgtctgcgagaaataccagatgaataatggatatttcagtacaacgcttgggcgccttaccaggttgaatgtcctcgttgccagacttgctccttattatactgatagtgtatcagctatagctgaagctgcttccctgtaaaatacggacaataaaaaacgccggggcaatacataatacgcgagaaatataagcctgcagtcaaatgagagtgcgggtattatcaacgaggcatgctttcattctctgcttttgctaaagcattcagtgtggagacaggagtgctaactcatagcttatcatccagggaatcttatctatagagaagattcctgtcggttaaccggaaaatattatcgggagataatgtcataaatgctgcctgagtgtatttctcacattgcatttatgaagttctcctgaaaaaagattcccgtcgttcgggatattgattgtgtctgttgtgatgacagatacggtgtgcgtagttcaattaaaaacaggaattaaatatgaagttaaaattcatctccatggctgtattttcagctctgaccctgggtgttgcgacaaatgcgtctgctgtcaccacggttaatggtggtacagttcattttaagggtgaagtggttaatgctgcatgtgctgtaaacactaactcattcgatcagacggttaatcttggacaggttcgttccgaaagattgaaagtagatggagctaaaagcaatccagttggatttacaattgaattaaatgattgtgactcgcaggtgtctgctggtgcaggaattgtcttttcaggcccagcagttactggtaaaacagatgttcttgctttacaaagttctgcagcgggttctgcaacaaacgtcggcgttcagattactgaccataccggcaaggttgtacctttagatggaactgcaagctcaacgtttacattaactgacggaaccaacaaaattccatttcaggcggtttactacgcaactggacaggccactgctggtattgccaacgccgacgccacctttaaagttcagtaccagtaatatcagaacagtgtaacggatatatacccggccagggagggctgtttttatccatgcgggtgtgagattaatgaaaatatcgaaaatggcaataatgttatttttgctgtctcccgctgcactggccggaaaccactggcatgtcatgcttccgggaggaaacatgcgcttccagggaaaaataattgctgaagcatgcagtcttgccctgtcagacaggcagatgactgtggatatggggcaacttagcagcaatcgatttcacgccgccggtgagtatggggactctgtgggctttgatattcaccttcagggctgcagcactgtcgtcagtcagcgggtggggatttccttttatggcgtgtcagatattcacgagccggagttgctgtcggtggatgaggagaatgatgcctcagacggaatcgctatcgctttatttaatgaaagcggagagctggtaaaacttaatcagcctccggagaactgggtgcatcttacccgcggagatatgaaactgcatatgcaggcgaggtataaggccacacattatcccgtcaccgggggaaaggcaaatggacaggtatggttttctctgacctatctgtaactggcagatataacgccatttaattaaggctgttaataacatgatgaagcacatgcgtatatgggccgttctggcatcatttttagtctttttttatattccgcagagctatgccggggttgctctgggggccacccgtgtgatttaccctgaagggcaaaaacaggtacaactggcggtaacaaataatgatgataaaagtagttaccttattcagtcatggattgaaaatgctgagggaaaaaaggatgcccggtttgtaattactcctccgttattttccatgcagggaaagaaagagaataccctgagaattattgatgccacaaacggacagatgccggaagacagggaaagtttgttctgggtgaatgtcaaggccatcccggccatggataaggcgaaaaccggcgagaattatctgcagtttgcaattgtcagcagaattaaactgctctaccgtccacagggactggttattccgccagaacaggcaccgggtaaattagagttcacccgtgaaaacggagggctgactctgtttaatccgacgccgtattatctgacagtgactgacttaaaggccggaaataaaagtcttgaaaacaccatggtacccccacagggaaaggtcactgtgaatatccctggaggatacaccggaggagatattacttataaaacaattaacgattatggtgctctgactgaacaggtgaagggtgttgtgaagtaactcagttatttctggtactggttgtgtttggctgctgattttattttttcgctcagtgtgggggctgacatgtttttcggagatggcggacagctcctgtctgataaatcactgaccggctctgctggcgggggtaataacagaatgaaatttaatatactgccgctggcattttttatcgggataattgtttctccggcccgggctgagctctattttaatccgcgttttctgtctgatgacccggatgcggttgcggacctgtctgcatttacacaggggcaggagcttccgccaggcgtgtaccgggtggatatttatctgaatgatacgtatatctcaacccgtgacgtgcagtttcagatgagtcaggacgggaagcaacttgccccctgcctgagtccggagcatatgagtgcgatgggggtaaaccgttatgccgtgccgggtatggagagactgccggctgacacctgcacatcactgaattccatgattcagggtgccacattccggtttgatgtcgggcagcagcgattgtacctgaccgttcctcagttatatatgagtaatcaggcccgtggttatattgcgccggaatactgggataacggaattacagcggcattgctgaattatgacttcagtggtaatcgggtgcgcgacagctatggtggcaccagcgattatgcctatctgaatctgaaaacaggactgaatatcgggagctggcgtcttcgggacaacaccagctggagttacagtgccggaaaggggtacagccagaataactggcagcacattaacacctggctggagcgggatatagtttccctgcgctcccgtctgacgatgggggacagttatacccggggggatatttttgacggtgtaaatttcagggggattcaactggcctctgatgacaatatggttccggacagccagagagggtatgcaccgacaattcacggtatttcccggggaacatcccggattagtatccgccagaacgggtatgaaatttaccagagtacgctacctccaggcccgttcgagataaacgatatttatccggccgggagtggaggtgacttacaggtaaccctgcaggaagctgatggcagtgtacagcgatttaatgtgccatggtcttcggtgcctgtactgcaacgtgaagggcatctgaaatatgctctcagtgccggagagtttcgcagtggcggacatcagcaggataatccccgttttgctgaaggaacgctgaagtatggtctgccggcaggctggacggtgtatggaggagcctggatagctgaacgctaccgtgccttcaatctgggggtgggtaaaaacatgggctggctgggcgctgtttcactggatgccacccgtgcgaatgcccggttaccggatgaaagccggcatgacggtcagtcatatcgttttctgtataacaagtcactgacggaaacagggacaaatatccagttaatcggataccgctactccacacggggctatttcagctttgctgataccgcctggaagaaaatgagtggttacagtgttcttacccaggacggagtgatacagatacagccgaagtatacggattactacaatctggcttacaacaagcggggaagggtgcaggtgagtatcagccagcagacgggggaatcgtcaacgttgtatctgagtggcagccaccagagttactggggaacggacaggacggaccgtcagcttaatgctggctttaactcatctgtgaatgacatcagctggtccctgaactacagcctgtcccggaatgcatggcaacatgaaactgaccggatactgtcatttgatgtcagcattccgttcagccactggatgcgttcggacagcacatctgcatggagaaacgccagtgcccgttacagtcagaccctggaggctcacggacaggctgccagtacagcagggctgtatggcacattgctgggggacaataatctgggatacagcatccagagtggttatacccggggagggtatgaggggagcagtaaaacaggatatgcctctctgaattacagagggggatacggtaatgccagtgcaggatacagtcacagtgggggctaccggcaactgtattatgggctgagtggcggtattctggcacatgccaatggtctgacactgagccagcctctgggagatacgctgattcttgtccgtgcaccaggtgcatctgatacgcgcattgaaaaccagacgggggtgtctacagactggagggggtatgctgtactgccttatgcaacagactatcgtgaaaaccgggtggcactggataccaacacccttgcagataatgttgatatagagaataccgtggtcagcgtcgtgcccacgcatggtgccgttgtgcgggctgactataaaacccgtgtgggtgtgaaagtgctgatgacgctgatgagaaacgggaaagcagttccttttggctctgtcgttacggccagaaacggggggagcagtatcgccggagagaatggtcaggtttatctgagcggaatgcctctgtcaggacaggttagtgtgaaatgggggagtcagaccacggaccagtgtactgcagattataaattaccgaaggaaagcgccggacagatattaagtcatgtcacggctagttgcaggtaaagaggcagggaaatggtgaaggatattattaaaacagtgacattctcctgcatgctggccggcagtatgttcgttacctgtcatgtctgtgcagcgggttctgtggtgaatattacaggcaatgttcaggataacacctgcgatgttgacattaactcccgaaaccttgatgtcagtctgggaagttatgacagccgacagtttaccgcagctggtgataccacacctgcgtcggtatttcatgtcgggttaacctcctgcggcagtgctgtcagtgcagtgaagctgacatttacgggcacaccagataatcaggaggcggggcttattcagattaacagcataaatggagcgcggggtgtggggattcagcttcttgataaggataaacatgagctgaaaattaatgtgccgacaacaattgcgttaatgccgggaacacagaccatagcgttttatgcccgtctgaaagccacttatcttccggtaaaggccggtaatgttgatgcggtgattaattttgtacttgactatcagtaaatataacacagaggaaaacagatgaaactgaaagctattatattggccaccggtcttattaactgtattgcattttcagcacaggcagtggatacgacgattactgttacagggagggtattgccacgtacctgtaccattggtaatggaggaaacccaaacgccaccgttgttttggataacgcttacacttctgacctgatagcagccaacagcacctctcagtggaaaaatttttcgttgacattgacgaattgtcagaatgtaaacaatgttactgccacctttggtggaaccgcagaaaatacaaattattacagaaatacaggggatgctactaatatcatggttgagctacaggaacaaggtaatggtaatacccccttgaaagttggttcaacaaaagttgttacagtgagcaatgggcaggcgacattcaatcttaaagtccgtgccgtaagcaaaggtaatgctggtgcgggaagtattaattcacaaattactgtcacctatacctatgcgtaaatattatcccctctttaagaaaagcaccgtcctcgagggctgtgttttattcacatttataatggcatattcccagccatcgtttgcactgttgtgcagaaataaccagacagggcagacttttcagtctggagacagtcgcttcaatatcactctttccccaacagttcagtatgataaagccattacagttctggatttaaatcaactggtgttatgtcagaatgaagatgcctctggtcagaactatgactatctcagggtcagacagggaaccggtttttctccttcattagatgctaaaacatacggaaggctggactttacaaacaggctttctgggtatagtcagacgttaccgctgcagcaagacacaaagccaacagaagcttactggcaatatggtgtatggaaacctttcccggcaaaaatgtacctttatcctgagccgggcgttttcgggaaactgatacatgccggagaattagtggccacagtttatgttaataagttttccaccatggggcaggaggcaggggagagaaatttcacctggcgtttctatgcaacgaatgatgtctatatccagacaggtacatgcagggtctcatcgaacaatgtcaaagttgaccttccgtcctatcccggagggccggtaacagtccctcttactgtacgttgcgaccagacacagtcggtcagctataccctgtcaggttctgtaacaggaagtggtaatactgtattcgcaaatacggcaacatcaggggccggcggtgtgggtgtacagttgtcggacaacgcggggctggttccggccggacaaccgaggtctctgggacaggtaggcagctctcctgtgagtctggggctgaaggcctcttatgctctgaccggtcaggcaagtccgacgcccggtgctgtccagtcagtgataaatgtgacttttagctacaactagaatgcagttgtggcggtaatgatattactgctctttatatccagtttttcatttaatgtatcactgtttgtggagaaaaatagctgataatagtattgtttccggtgttgtgacggaacgagtctgtcatatggtctttgtcaaagataaacagaaccagtatgagccgtatatctggttctgagcgttgtcagtaatcataaagataatggtaaatctgagggtttaaaaatcaaatcagaagaactgcgcttatccagccagaccttctggtcgggaggggctcatatttccggaggagtaatgtcaggggcagttaacagtatactggaggtgaaatcaggcagaacagaatatatcctctcaccggtttttgagcctgtatggaatcagaccgggaaaatatttgcttttgaaatgctctcggatatccgttcagcaaaagacgggaggaaaatctgcgcatctgtttttttcagaagtgcacctccggatattcagtacaaaatactcatcagtcagttgaagactgcggaaacgcttcataaatggtgtctgcagaagaaaataatgctgagtgtcaatatttcccgggtggtagccctgtatctgagaaaacatggcatcccggggcggccgggaacacatatcaggcttgaggtcagtgaggactttccggcagtggcgttaaaacccggtgatgaccccctgttacgttttttgtcagaacgtttcaccctctggctggatgatttcggctcaggaaatgcaggcttaatgtggggactgtccgggatgtttgaacgggtaaaaataagtcatgagttttttcattatgccctgaaaaacaggtgtgcaatgtcgcttctccatgctgtggcagactctgttgcctgtcataaccggggcgtgatacttgaaggtgttgaaaatgaagcgttgttccgtattgccagagacatgaatgtccagggctgtcagggatggctctacaggcgtgtggaagctgatgaattatccgcgattactgagctgcatggataatcctttttcacagacttgtcagcagccagcatttatgttcttttatctgagggaatttatctgtccgctgtgccgggatatctcagttatacagaaatcaggcaggaataaattgtagtggaaagtcgatgtttaccggatgactgatgcgcgcttgtacacagacagtgtgtttcagtaatatggagaataatgaaatgaataacacagacacattagaaaaaataatcagacaccaaaaaaacaaagaccccgcatatccctttcaggaacatttgttgatgcaactctgtattcgcgcaaataaaaggatgcaggataatatatctgaatttctgggggcgtatggaataaatcactcagtgtacatggttctcaccacattattcacagcggagagtcattgtctgtcaccttcagagataagccagaaactgcagtttaccagaactaatattacccgcattacagattttttagaaaaaaccggatatgtaaaaaggacggatagcagggaggatcgccgtgctaaaaaaatcagtctgacatctgaaggtatgttttttattcagaggctcactcttgcacaaagcatgtatctgaaagaaatctggggttatctgacccatgatgaacaggaactgtttgaagtcattaataaaaaattactggcgcatcttgatgatgtcagctcataaagtgtgaaatgcctgacttgttgaaagcagtagtgttgcagaaagacctggtgatgctgatcttatatacataagcagcgcccgtgtctgaaatgcaggttagaaacaatgtgaacactatccgttagaaattgtgacaaaattcccgatgatcgacaagcgcaccgattttccagtggcaacatcagtacaaaagatgaacggtactgactttgccggaatgagtcaaaaagaaagctgaactggcactactggcagtgcttcagaaatttatttgactgaagtacaatgaaataaaaaacatatgttatatactcaataaacctcaagatgcgggtgtgagcacctgaaagtgatcgttaattcgggatgtcagtgagtccgctatatccggcagtgtctggttaaaaaagacagatattgcttccctgaactctcgcgtactgctgaagtagcgattattccgggcatgttcgttcattaatttccacattctttctatcggattcaggtttggactgtaagggggaaggtaatgcagcctgatatttaccacttccgcccagtctttcactaactgtgaacggtggtaacctgctccatccagaataacgtggattttttggttataatcaggataaacctttcgtatctcattgaaaaaacgggatacattatattcattaatggttttatattcgcagattagcggtgacgtcagtgctttcagattcagcgcccccatgatattcaggcgtgtgcggctgcctgttgtttttactgcttttttctggcctttgcgtatccagccatagctgattttagtggcctgagtcggatggactccatcaataaaaagaatcggctcatcacccacagttgttttcagttccttatagtattcaatgaattgcctttgtttctcttcactgaatttatgggggacgcctgacggttttttgtaggtgacaccattacgatgcagccacttattcatccccggaatgctgaaaatgatgttccatgtccgggtgacaaacgcaataacatcgcgggtatggtgaaataaattatcggataactggctgattaaaaaggccgtttgttcagcactgagtttgctgtctgagccgccgttttcgggcttcagttttcctttattcaggaattcgctgatatggtgatcaatcgttgtctgatgcaggcgtaaagcctgagcaatcatggcagaactccagccttcggaagccagaagaatggctttaatacgatctctgactcgcccgtcacgactggaatcatgaaggcgttcaagttcagctttttgttgctcagtaatgaatattttcatgttggacagcatgatcttctgttgctgaaaaatcaagcatcttcaatgatcacgggtatatatcaatttgatatttatgaaaaatcaatagatttatcttgtgagggattgctttttcttttgctaaatgatattaattatcattcttatataaaaacaataatggcagtaagaaatatctggcaaggatgtgagcttaacgatcaaacattttaagttaggcatttattagggaataggaatgagaattaacaaaatcctctggtcgctaactgtgctcctagttgggttgaatagccaggtatcagtagccaaatactccgacgatgataatgacgagactctggtggtggaagccaccgctgagcaggtattaaaacagcagccgggcgtgtcggttattaccagcgaggatattaaaaagacccctccggtaaacgacctttcagatattattcgtaaaatgcctggtgttaatcttaccggcaatagcgcctcgggcacacgcggtaataaccgccagatcgatattcgtggtatggggccggaaaacaccttaattttaattgatggtgtaccggtgacgtcacgtaactccgtgcgttatagctggcgtggggagcgtgatacccgcggtgacaccaactgggtgccaccggaacaggttgagcgtattgaagtgatccgcggccctgcggcggcgcgctacggttcgggggccgccgggggggtggtgaacatcattaccaaacgtcccaccaacgactggcacggttcgctgtcgttatacaccaaccagccggaaagtagcgaagagggcgctacgcgtcgcgccaatttcagccttagtgggcctctggctggtgatgctcttaccacgcgtttgtatggtaacctgaataaaacggatgctgacagttgggatattaattctccggtcggtacgaaaaacgcagccgggcatgaaggggtacgtaacaaagatattaacggcgttgtctcgtggaaattaaatccgcagcagattctcgatttcgaagtcggatatagccgccaggggaatatctatgcgggcgatacgcagaacagttcttccagtgcagttaccgaaagcctggcaaaatccggcaaagagacgaaccgcctgtaccgacagaattatggcattacgcataatggtatctgggactggggacaaagtcgctttggtgtttattacgagaaaaccaataatacccgcatgaatgaaggattatccggcggtggtgaaggacgtattttagcgggtgaaaagtttacgaccaatcgcctgagttcctggcgaaccagcggtgagcttaatattcctttgaatgtgatggttgatcaaacgctgaccgttggtgcagagtggaaccgcgataagctcgatgatccttcctctaccagcctgacggtgaatgacagagatatcagcggtatttctggctctgctgcggatcgcagcagtaaaaatcattctcaaatcagtgcgctgtatattgaagataacattgagccggttcctggcacgaatatcattcccggcctgcgctttgattatctcagcgactccggcgggaacttcagccccagtctgaatctttcgcaggaattgggcgattatttcaaagtcaaagcaggggttgcccgaacctttaaagccccaaacctgtatcaatccagtgaaggctatctgctctactcgaaaggcaatggctgtccaaaagatattacatcaggcgggtgctacctgatcggtaataaagatctcgatccggaaatcagcgtcaataaagaaattggactggagttcacctgggaagattaccacgcaagtgtgacctacttccgcaatgattaccagaataagatcgtggccggggataacgttatcgggcaaaccgcttcaggcgcatatatcctcaagtggcagaatggcgggaaagctctggtggacggtatcgaagccagtatgtctttcccactggtgaaagagcgtctgaactggaataccaatgccacatggatgatcacttcggagcaaaaagacaccggtaatcctctgtcggtcatcccgaaatatactatcaataactcgcttaactggaccatcacccaggcgttttctgccagcttcaactggacgttatatggcagacaaaaaccgcgtactcatgcggaaacccgcagtgaagatactggcggtctgtcaggtaaagagctgggcgcttattcactggtggggacgaacttcaattacgatattaataaaaatctgcgtcttaatgtcggcgtcagtaatatcctcaataaacagatcttccgatcttctgaaggggcgaatacctataacgagccaggccgggcttattatgccggagttaccgcatcattctgatcgtagtgtttcaggcgcactgcccgcgtaaaagcgggcagtgtttagtggcttaactcatgacaacctgctgtgtaatttgcgttttcaccactgatatctaacagtgcctggcgaaaggaggcattgaacatcggcccgtgtcccaggttggggaaatcccaaaatacggcattgacgcctttatctttcagtatagtgagggtggtatgaattttcgacagcaccccgacagcatgcgtttcccggttatcaccctgtgtcgccgagccttccattatcgccaggtgtttggtgcagaattgcagaggctcaaccgccgtaacgcggcttagcaaagcatcataacctctgcccaacgacgggctggcgctgtagtacgaccggaagtaagaggaggacagccaggaatccagcacgaagaggccgccgtaggagtgcccccataagccgcggcgttgccgatcgatattcagtccctgttccacttttggggcaatacgcgtttccagtaactggcggaagttgttgctgccaccactcttacggctaaaacgccctgagtggagatctgtttttctgctttctgctgctggcgtatagtcgtaagccctgctgttgagatcgaaagggaggttggtctgatacccgacagccacgatcactggcggtgttttttctgacaattgtttgagcagttcgtcatccaggcggtccataactgcgttaccgtcaagcatatataaaatcgggtaacccgatgccggtgcggttgtattcggcacggccgtccatacccgataatggcgtgtgccatcgacagagtcgaaagaggtggcgctgaaatggtaaaacacggagcctttatcggctatattcggccccagtggccgcatatccggcttcgcataaacttgcgcactacagataagggtgaggcaagaaagatgaaagaaaatcgctttatgcgggcgtgttgagcgatactcgcgggcatacatctgatgattattccttttccgcaggtgacaatttgatttattcaggaagtctgtaccgtttcctgaaagtgtttgtgggtcaactcaaccctgtagtaaaccaatcccgtcaatcagtgcaccgcgccaccatgcgtaatcgtgaccaccggtgtagattgcgcaatggctttcgacgccagcggtaatcagccgctggtgaagttgctgaacgtgaggaactgtcgaaccttccagcgatcccacgcacaggctgatacgcacgccctgcggtggggcagaaagcagatgctcactcacccatgaggtatcggtttcgctgaacaagcctggtcgactggttctttctggcgtccaccacattgaaggagagtggctgagcaccagaccgaacgtttccggtgcgtaacgagcccccattagcgcactgatcccgccgaggctctgcccggccagcactgtgcgcgaacggtctgcccactgacgctgcggttgttcagcgcggatcatcggcagcagatgccctgcgatatcctttatcagcttgctgcgcccgccgagtatctcagtgcgttcatgttcattaatgttgtcaatgcccagtacagccacgggcacgatgcgcctgttatttatggcggcgtcaattgccgcgcatacgccaaggtgatcaaaccaggtttcaccatcgggcagcacgaccagcccgaggggctgagaaatatcaatgtccggaatatagagccgaacctggcgagatttcccggcgataatgcgcatggaggtaagcagttgtccggtgtggaagccgccgttccattccgacagggcgggagctttatcaagtgtcagcactgattcctttgcgtttccccgaacgttgatctccggcattttgtttagcggatcggcctttccggcgagggtggcaaaacggcctccggacagtgcaatcgtctcagccgtagtgccgggggggatttccagcagcgaataggagccgcagtaacttgcgggtaaacgcagtgtcagtgtccagatatccgtttcgggaagggcgctcatcattcctttttctacgtgctctttatccgtcacccggttcagacgcagataaacgccctgcaggggatgtcgggcgcgccacagaaaggtcacttctcgctcatcttccgctccttcgactggcgtcacaagaggaacattcagcgactcagcttcgcgccagaagtcagtaaggttagcaatgtggcccgctgccagttggttgcgcaggctggcgatagcagagggatgttgttgcatgttcagcattcatactctttaaaaattaaggatgtcagtataaataattaaagcggctattcacggtaccgccgcttctgactgtgtttttaatacattacgtgtccagtaactatcccggggtttcctccttcatgttgtgctggcgatggagcgcagtactgctgacgctgtcatgccataagcgggtatagaggccgcctgcagataacagctgttcgtgggttccgtattccgcaagtaaccccttatcaataacggcaatcagatcgcagcgttgcgcggtggtcagacgatgtgcaacaatcagcgccgagtgcttcccggcatgcacgacatctgttaacgatgacatcagtcgttcttcggatgtgcgatccagacatgacgtggcttcgtcgagcagcaggatgtgagcattcgccagttgcgcgcgggccagcgcaatcaactggcgctgacctgcggacagatcggctccgccgttattcaccggtgtccggaatccctgcggcagattgcacaccatctcatacagccctgcccgctgtgaggcaatttcaacgtcttcattggtggcggatggccgtgaataacgaatgttttctgcaatatcactactaaacagtgctacatcctgatcgacaagcccaatctggcgacgatactcagtgagcgaggcatcatcgagcatttgcacaccgattctgatgttgccgtgcgtggggaaatacaacccggcaatcagcttaatcagcgtcgacttacccgcaccgctgcgaccgacgaccgcgacaaccattccctcagggatcgtcagggtaagtttgttcagagctggctcgtgactgtcgggataactgaacgtgacctcatcaagatgcagtgcaccggtgacagggaggaccgaagaggacccgaggttctcagtgccttctgtcgccagtagttcatcaatatgtttgccgctggctgtcgcctgctgccaggcgtcgacaatccctgataactgctgcactggcccatagaattgccccagcaacaggaagaaagccgccagtaccccggcagtcatttctccagcggcgacctgcgaagctcccactaacagaacggcggcataggaggcctcggtgcagaatgtcaggaacggaaaatagactgcaaggtatttttgtgctcgcacacgggttgcgcggaaacgctccgataacgcgcgcagccgggcgccctccagttcctgctgaccatgcgattgcacgacacgcaggccggagactttttcctgcagggtgctgttgactttgcctatttccagccgtgcttgtgcataagcaggggtactgaggcggcgataaatcatggttgccagtgcggccactggcactgcgcttaatgccgtcagcgccaggatcgggtcgagccagaacatggtggcggcgattgcgaacatcgtcaccagactggtggccgcaccggcaaggccgttttgcagaaagcgggcgagagagtccacatcaacggtcatgcgggtcagacgcgaatcggcatgcttttcgtgccaggggagtccaagacgcagcatatggccgaagctacgcaagcgcaccgaatgctgaactgattccgccgctctggcggcgaagaccgtctgcagagaataactgcaccagcccacaatgactaggcacagggcgagcagggcacagaggccgatggtcgacatatcgcctgcggcgacaccggagtcaatgccgtgctgcaacagtatcagcacccctacgcctgctgcagaatcgagtgcgatcagcagagcggcgatgacgaacatccatgccacaggcttcagtagtgacgtgactttgcgacctttaccggccagcgcctgctgtactgcattttccggtacgcgggtcatacgggcgacaaaacctttatcccccgtatccgttacatcgtcttgtgtcgctggttcagccggccacaattcgttgtggctattgtgggacgtggccagaaaatcgctgtcgccggtcatcagtgcgcggaacgccggacagcgcgcttcaagttctgccggggttccggtatccaccatacggcccttatccagcaccacaacccggctggctagctgaagcgttgaacgccgtcgggcaatcaccagcagcatatgcccttcgtcagcatagcgacccagcgcggtattaatctccgcttccgtaacagcatcaaccgctgaggtggtatcatccaggattaacacgtccggtgcagtaatgagcgcccgcgccagcgctattcgctgcctctgcccgccggaaagattcgtaccccgttcggttaacaggctatcgaagcctttcggcagggcgttgataaaatcgctggctcctgcagcagctgccgcacggcgaatgtcgtccgccgttgcctgagggtggccataggcgatattttccgccaccgtaccggcaaacagaaaagcatcttcaaatacgatgcctacccggcgacgaagcgcctccagtctgatatcgcgaagattttgtcggccttcgctggtgttgagccatatctttccggagcagggatcataaaaacgcgccagcagcatcaacagggtcgattttcctgaacccgatgcgcccaccaccgccacggtttccccagcgcgcagggaaaaggagatatcgctgaggatatgtctgtcgccatggtggtagtcaaagctcatattctccagttccagtccgacaacctgactgttaatcgactccgtcccgtcctccatctgtgaacgggtgtcgatcagtgcaaacacccgctccacggacgcctgagtgcgctgtgcgataaccagaaacgatgccagtacgcgggttggcccggtcagcatcgcgaggaagctggcgaatgcaacgaaggtaccgagatcgatccgcccgtgcatgaccgaccacccgccgtagcacagcaggacgatttgcccgagcaccggtagcgccagcatagtggccccaggcatcgcctgcgagataaccgcaccgatgcgtacacgcacaatctgccgcgactgcctatcgagccagtgcgtttcacgcatctctgccacacaggattttaccactgagatctgtgccagcacctcgcgtatatgttcggtgagattcgccagttggtccgaggccattccggtttgcgcgaagaccctacgacgcgcacgaagcgcggtgatcgccaagcataccagtacgcacacgacgataagcgtcatggcaggggacatccacagcatcacggcaatgccggcaatgtaataagtgaacactgccagcggcaccgggcacatctgcagcagggtatgcacctgctgcagatcgctgttggtccgtgaaatcacctgcccggtgcgcagcgcatcctggcctgcgccgtcaagtttttgaatactgtcgaatacccgtcctctgagggtatgctgcacccagagtgagagcatcccggcataaccacggcgcacatagttaccgatgaaatcaaaaaaagcgatcaacagtaacccgcaggccagccacggcaggcgggccggattgcccgccagtgcgtcattcacagcctgtcttgtcagcagtggcgtcagcgcagccagcaaaatagtcgatactgacgctaccaccacgatgacactaagtttcttacgttcccagcacacgcgcgccaggcgaactatccatgactgagccggtgtgggagtgtgattcgcaggcattaagcctcctccgtctgtaaaatacgatccactggccggatcgttccgcaaaaaagccagcacactccggtcccgcattgttatggatgcatgactcctggatgggggctggcaaatgattatcatgaaggtgtagtggctaccctttctgtaccattgtgatcaggcttttcgccacttcaccagggcagggttgcgccgccatttccgctgctacctcttcagaggctttgcgaagtgagcgattgttgaggaaagcattgatcatgttactcgacaggccgacgtcgccggggataatcccgcagccgcgttcggcaacaacgcgggcatttaccgggcgatcggctccctggccgaagactatttgtggaataccagcgtgtagcgctgtcagggtattgcctgctccgccatgatgaatgaaaccatctgcgccgttgaggaagacacccatgggtatccagtcaaccaggcgaacatttgatggcagcgagcgcaaatcggaccgcgcattggctgaaatatgcaggatgatctcggcatcgacctcactggcagaatccataacccaggcgattagatcaaggccgtcaaccatcggtttgacagtgccgagactcaccagaagacgtttacgatcgggccttctctcccaccatggttcccacaccgcaccaccgttatatgggacgtactgcatcggaataatgggttcaccgtcgttttccagaatgctcatactcggcggtgttacgtcgatccaggccatatcgcgtggtgtggccccgacattgtggcgacgataggcgtccgtgagcgaacgcgttacacccctgatatgccagggggtatggccgaagcctacggtttgcatcacgaccggtatatcatatttggcggcaatcagcggcccgatgactccgagtggagggtagatgatgaggtcaggccgccagtgtccggcaaactccaccagatggtctgccatttcttcgctgaagaatgagaagttgcccatttgggttccgatgttactttttttccgctgtgcctcatggtggcggtaaccagcttcggaatccagaccgggggcagcgtcaaacaccaccaacccggcctctgccgctttttgtgcgaattgtcctccgctggcgatcagtacttcatgaccgttaacgcgaaatgcctgcgccagggacagcacaggatacaacagcccatagagaggcgggcctacaaacaaaatacgcatgagaaaatccctctccgcttgacgatctaaatcaggcagtcgacgcactcatatgccagcagcaggacacgacttttcgttaaacctgctttaccagatgctgcgccatttgtgcttcaccagcgttatggacagatcagtcagagacttttccgtgacatacacaggtgaacagggaactccgtatccccacttccattaacgcttacgcgccattgtcctgttgaacatcccggcgtcagacagctacgccgggatgttcttacgcatttgtgcagtgttagaccgacaatgaatctggaaagatccgtgactttttagacacacggcttgcatcatcctgatagtctcgccttcgctggcctgtaagtaaaatgaccttgtactggcgatgcgtgttccctttcagccttaccagagacaacgttagcgcaaatgctaatgataataattaccaatatcattaaggtattgcaacgataattaaaaacttaatgaaaagggaagcactcagaggactatccgggggtatttaaattgaaacctacgctgctccagaccgtggagaatatttgcctgcaaattctgttcgtgctgttcctgttcaccggaacgctgatagacgttgaggcattggtgagctgttcttccgttgccaaaaatgtacagagaactccggccagcagcgtttcatcctctgtctatagcgcaagcgtgtcgagaactgctgctgatattatgctgttgtcgaataatccgctttttgctccgggtcaggtgagttttttcggctgttcgttggcagcgtcaggtattcacgtcaccattctggagtaatgccagtcaattaagcaactgactggctctttttgtgcacagaaaacccccagctaggctgggggttccggaaagctttcagctttgagccagttattaaaaccccttttgatttgttaaaacaccttgcggtctggcaactgcaagtgtcaaacaagaaatcaaaagggggtcccaatggggaacgaaaagagcttagcgcacacccgatggaactgtaaatatcacatagtatttgcgccaaaataccgaagacaggtgttctacagagagaagcgtagagcaataggctgtattttgagaaagctgtgtgagtggaaaagtgtacggattctggaagctgaatgctgtgcagatcatatccatatgcttgtggagatcccgcccaaaatgagcgtatcaggctttatgggatatctgaaagggaaaagcagtctgatgccttacgagcagtttggtgatttgaaattcaaatacaggaacagggagttctggtgcagagggtattacgtcgatacggtgggtaagaacacggcgaagatacaggattacataaagcaccagcttgaagaggataaaatgggagagcagttatcgattccctatccgggcagcccgtttacgggccgtaagtaacgaagttggatgcaaatgtcagatcgtgtgcgcctgttagggcgcggctggtaagagagccttataggcgcatttgaaaaacctccggctatgccggaggatatttattcggggctgtggggtatttctagggcctctcctttaccactctcgggaaggccgtttcccttcttgtcggtaatttcacaagttgtcccatacttgcaagatcgcgcatcagctccggtatacgtcccggtgaagcgccctgcaatgtcatcagcattctcatcaccattccgcatgattctgagaaactcagttgattcggccagtaacctttcagatgttccgccattttaatcatctgatatctcaccagattataagccagtaagacaccccacagctcttgctccacaagctccggctttttacttctcagcgtcagcctgctcagttgcatcgtctgttttatctctctgtatccctggtcaggttgacggggcactagtggtttcagcggttaatcgtcgaacaggcgcgagacaatattcgcattcaacaaaataacaaacgcaacactgatcgttttgttgagaggataactctttttcagggttatgggtgaaaggcctgaaaatttgcgattatctttaagagagtcacaaatacactccaaaaccaaaacccgctctctcattctttagactgaacttagcgtagctcaccatgtcaaaatgtttgaaactgctctggtgtgggaagtgttcgaaaactcgtagattgttatttcaatcagtgcgcaaaagagtgtcttactgaaaaatgaatatagatattcatctggcgattcgagacgaaaagatttctttcatccgcagttatgcgcatggttaagaggtgacgattgaagaagtcctgatcttactgaagttacgcggatagtgggtaatgccgcgagattgatggaactttaaaaattatctcttaacgttttacggatataaaaagtttattttttgttaagagagattacttcaccagacaacttgaactcgctgcagggcgttttttatgcccgaaaagctgcacagtacgttaaatatgctggtgattgtgcagtgagtttctccaagcctgatgtgacttgactgaatgatatcacatttgtaatgtaaaataaatcaatgtttttaagttgctaggtgcttgtttctatagctggggcacttccttttactatggctttccatggtggggggcggagctggtgttgatgatgtggccagaagcctgttttatgctgttacagtcatcgttatattccttattggatggggagcaggtattgttttctttctgggaattaaacaaaaaacaatatgaaggatttgagttttatcagattttttctggcaatattgttgcttcttgttcctcctgctctggagtttccagtaattcatcggcacattacgccaggtgcactgactttatgcgtcattacagccttaataattacgctgcttgccagcttgggcggcaggcttgtctcagttaaatgtatttcggagatttcgtttattcgtcgtcaccggattgagtgcatgatggcgggatttatgatttatttctggacattctctcttattgctggttggtacaagccccagtttaagaaggaatatcagacactccactatgagaatgctaggtattacgttcttgcacgctatgacggtcgtttggttttatcacaatcgtacaggagcgggagtaggaagtttgttataatcaatggcggacatagactttgagattaatgtagtcagagtgcgttaaaattcccttagaaatcgggaataggtagtactagatacgcaggatttaatcagtcgtattgagatggaattgcagagttaaactggcatggattattttgtacccagcccttaagaacaatggtgagagatagtaactcataatcgccaattcactgttttaaatttagtaagggccgctatccgccactggctcatcgggaaagagcatcagccttctaagttgactgtgcgaggttcgagtcctcggtggcggtccagtactgatttagctcagtaggtagggaattgccttgtaatcagtaggtcaccagttcgactcttgctgtctcgccccatattccaataggctcgctttgacggggcttttgtatgtcgcttgcgatatgttacagtaccgttatcagtctgtagaaaatacacacaggagtgaaatgttaaattacccacaactcagagagcggagtgttgtcctgttagtggggaatttgttaaaagaatccagcatggtgaatctccctgtgcggctgtctcttgatcagatctcctgatcaagagacttcatcaccggataaccctcaaccatatcctgaagtctgaaccagccatcccacataactacccaaccagggcggcctgtgcgtttgctgtcatgccatcgccccagtttcagacaggcccatttcagtgtcggcgtctgtgacggaagctgttttccttccagcttaacccacagcagtttccactctgtcggcgtcagtattttcttacagctgtcattttgtgtttcttcactgataccttcctgccgcaggcccagcatccgtaccgcgataaacgccttgataaccaccatgcgctcaaggttatcccgggtctgcattcgcagtgattccacacatgtaccaccacttttccacgccttgtggtattcctctatcagccagcgtcgctcgtaatggctgacgatacgtcgcgcatcggcggcactcgccactttttctgatgtcagcagatgccagcaggcaccgtcctctgactgctcccggcaacagacatacgtgagcgggagcgcctggccgctgttgtcgcgatttttatgctgacttcgctgtacctgatgaacatccgggcctggcgggctgcccgccctcctttttgcatcacattcagcgtgtggcttcccgcggttgccaggacttccggcagttcgaagagcttgccgggtgcttcttccagccggctattctgtgcagtacgcaccacgaagcgctgtccgtggctgactttataatgcaggtaatgccagatatccgcttcccggtcacagacagtgattacccgtttctgtatctcccccagccgttcggccatacgctccgaagcctgctgccagcggtaactttctttttcttcacagggacgttcttttcgctggtgcttaacaccgtaggtgtccgtgacccgactccagcgctgctgttcgataaaaccgactggcagggcgctgtcaggggcgtacatcaggacagagtgagccagcagcccgcgcgtcttcgggttagtggtggtattcccctggtcatcagatgccgtactgtggctgaagttaatggtggtggtgtcttccagtgcgaggagcagcggatgagcctcacatgcccttacagtggcggtaaatccggcttcggcaatggcttgcggggacacagacgggttacgtatcaggcggtacgcaccttcaacctgagcagtggactgggatgatttcacaatagaaagacctgcatgctgagcgagagaagaggtcagtgacacaaggcgtcgtgtacgacgcggatcaccgagacgggcatgtccagactgctcgttatcccatgaataacaatcagaaagtaccataacagacccgaagaaaatgaaatataagaaaagatcaacgagtgaagaaaaagttcaaaaaatggctgccggggaggaaggaaagtaccggatggaaagagtcccccctaaagcagactgacagacataacaaatccccggggggatttgtgtataagagacagtacttatctggaggtaattgcaatatctctgtgaacttacacagggtgggcttaccgcatacactgacacttagcggatcgacagaacattattaacagagcatcactgaacgctacataatcagagttgcataaataaaatgttatgatataacatcacaatcacaacatttgttttcgaatgtatatgaatgtaatcagaactgtcatttgtacattaattatacttccggtgggattacaggcagcgaccagtcattcttctatggttaaagatacaatcaccattgtcgcgacaggaaatcagaacacggtatttgaaacgccgtcgatggtcagtgtcgtcacgaatgacacaccgtggagtcagaatgcggttacatcggccggcatgctgaaaggtgttgccggtctcagccagactggtgcaggacggaccaatgggcagacctttaatttacgcggctatgacaaaagcggggtacttgttcttgttgacggcgttcgccaactcagtgacatggcaaaaagcagtggcacttatctggatccggcactcgtcaaacgtatcgaagttgtccgcgggccaaactccagtctgtacggcagtggcgggctgggaggtgtagtggacttcagaactgccgatgcagcagattttcttccccccggagagacaaacggtttaagtctgtggggaaatatcgccagtggtgaccacagcacaggctcggggctcacctggtttggtaaaactggaaaaacagatgcgctcctttctgtcattatgcgtaaaagaggtaatatctatcaaagtgatggtgagcacgcacctaacaaggaaaaacctgcagccctgtttgcgaaaggctctgtcggtataacagacagtaacaaagcaggtgccagcttgcgtctctaccggaataacaccactgaaccgggcaattccactcagacacatggtgacagcggcctgcgtgacagaaaaacagtacaaaatgacgtacagttctggtaccagtacgctcctgtggataacagcctcatcaatgtaaagtcaacgttatatctcagtgatatcactatcaagacaaacggtcacaacaaaacggcagaatggagaaacaacagaacctccggtgttaatgttgtcaacaggagtcatactctgatttttccgggagcccatcagttaagttatggcgctgaatattaccgtcagcagcagaagccagaaggctctgccacactatatccggaaggaaacattgactttacatcgttgtatttccaggatgaaatgacaatgaaaagctacccggttaacattatcgtcggttcccgctatgaccggtacaagagcttcaatccccgtgccggagaactgaaagccgaacgcctgtccccaagggcggcgatttcagtctcaccgacagactggctgatgatgtacggctccatatcctctgcattccgagcgcccacaatggcagaaatgtacagggatgatgtacatttttaccgcaagggtaaacccaattactgggttcctaaccttaatctgaaaccagaaaataacatcacccgtgagattggcgcaggtattcaactggatggcctgcttacagacaatgaccggctgcagttaaaaggcggatatttcggaacggatgccagaaactatattgccacacgcgtggatatgaaacggatgcgttcttattcttataatgtatcccgggcccgtatctggggatgggatatgcagggtaattaccagtctgattatgttgactggatgctttcttataaccggacggaaagtatggatgccagcagcagggaatggctgggctccggcaatcctgacacacttatcagtgacatcagcatacctgttggtcatagaggcgtttatgccggatggcgtgctgaactttcagcatcagccacgcatgtgaaaaaaggcgatccccatcaggctggttataccatacattccttttcactgtcttataagcctgtaagtgttaaaggctttgaggcgtcagtaactctggataatgccttcaacaagcttgccatgaatggcaaaggtgtgccgctttcaggcagaactgtcagtctttatacccgttatcagtggtaacctcgcaggaaataaatcatgatgaaaaatacaggctatatcttagctctttgtctgacagcatcggggcatgtcctagcccatgatgtctggattacaggtaaacaggcagagaacaacgttaccgcagagattggttatggtcataatttcccctcaaaggggacaattcctgacagaagggatttctttgaaaatccccggctttataacgggaaagagacaataacactgaagccagcgtccacggattatgtctataaaactgagtctgcaagcaaagataatggttacgttctgtcaacgtatatgaaaccgggatactggtcgagaacctcgtcaggatggaaaccggtcagccgggagggcagaaatgatgtggcttactgtgaatttgtcactaaatatgcaaaatcttttattcctggtgaacagcagatgccagcacaactctatcagtctccaacagggcatgagcttgaaatcattccgttatccgatataagtcgtttcagtgaaaatgtgaagctgaaagttctgtataaaacgtccccgctcgccggagctatcatggagcttgactcggtcagttatctgacatcatcccgtcatactcatgcagttgagcacaaacatcctgttcataaagcagaactcacctttgtaactaatgaggatggtatcgtcacagtaccttctcttcatatcggacagtggctggcgaaagtccaaaataagaaaagttttcaggacaaaagcctgtgtgatgaaactgtcgatgtggcaaccttaagcttctcccgaaattaatgatactattcctgccctgtattttacgggcagggtatatcaaccggaaatagcctactgacatccatgtaaaaaaactcataattattttgttgatgtatcttacctaatacattgatagctccagtttttataccagagcattctcgttgtccctatgtacttgtctgcaatatcactgatatgcaggaataatattcttggcatggagtcagttccccgtcatcttaggtatcactttaactcacaggtgtccagtaaatatgaacaggatcccagtaatcattatcaatggtttccttggcgcaggaaaaaccactcttatgaaaaacctgctcacacaggcaaacaggaatcacttagctgtatctgtcattgtcaatgatatgagcgatctggatgttgatggtgtacttattgcaaatacagaaatcgttaatattgcgaacaataatttcgtgagtatcacatctgatagtatcagcagccagagtgggattaagacggtcgacaaggcaattaaaaatatgctcaggcattatttgcctgacgttatatttgtcgaaacatccggaggtagccacccactgccattaattaagtatctgcagactcatgagcgattacagctaaaatcacttttatcacttgtcgataccgttatgctcaatgatgactataacggagggaaagcactgatacctgcatttcaggagaatcttttccatggcaagcgcagaatagagaatttactggctgagcaaatcatgttttgtagcactttgctgttaaccaaaaaggatcgactgtcattcgacattgtcaccgatgtggcgaaagcaatccatcctctgaatccttacgtaaatgtgatagctgtgtcatgggggaaccttaaactagcagagttactaacccttccggattacgattttaaccgggtcggattacttatcagagaactggaagacacaatcacagtagaagaagcaaaaatttcagcccaaaatggcgaaataatttcgcgagtgattaaagatgacaggccattccacccacaaagattatgggaaacctatcattattttatgggaatgggtatttatcgtagtaaaggctttttctggctaccaggaagacctgacatggctctgctctggaaccaggccgcaggaagtatcaatctggagtttatcagctactggaattccggtgtattggcagaccctgataatcacctgacccacgaagagcgctctgttttgcagaaaaaagtcaataaaactatggggcggtttggagacaggagatgccatttaacgattatagggcgttctgatgaagtccatgattttacctccgccttaattaactgttttctttctgaagaagaaattgtctggtggcaatcaggtggcgttttcgcggatccctggcccgttaatatatcccggctgaactgatgattaacgcgatattgcaaatatggcatatgaatcgatcgtagtttggcattcgaatcgatcatgatttgggtaaacgttcacggagcgccgtattgacgtttatttattgggtgagtacgacgttccatggcaggagttcatcaacacggttagaaggccattccggcaggacgttgaggatatggcgcagatacgattccggatcgataccgttcagtcggcaggcgccgatcagcccgtacagcagcgcactacgctctccaccgtgatcgttgccgaagaacatgtagatgatatgacctttatatactcactatagcattggtgggatattccagaggaggtcatcatgtattcggaaaatattgcggcttacgtcgggctggatgtgcataaagccccctagcagttgctattgttgcatctgaacgacttggcaaggttcgttattatggtatggtacgattaacaacgaagcccagtctgtacgtcgattatttcagaaattgcagggactttacggaaacattctttcctgctatgaagctggcccctgtggttttgggctatatcatcaactcacagcgatgaatataaaatgctaggttattgcctcttcccagatagtaaaatcaccgatagacaggatcaaaaatgatcatcgggatgcaaccgctaccgtttgcctcgttctggaaataaccttgctgatgggggtatggtttggtacgttgtggggatttgtatgtggttttcttcatggaaagacagtggtatgcaaccgggcgttgcatttgtctcaagcatagtcgcaggcatttgctttggtgttctcatggctgtgtaccattagtgtcgaaaggtagttaacaatcttccagactgggacagtctggagtaaagatcgttgtagaggctatatactttttaaatggactgggggtgagatgggaaaaataaaatattggctaatagtaggatttattatactttttgcgattttttacattgctattagtgacagggattctacgctttctaggttgaaatcagcaggtgaaaacggagatgtagaagctcagtatgctttggggctcatgtatttgtatggagaaattctggatgttgattatcagcaggcaaagatttggtatgaaaaagccgctgaccaaaatgatccgcgtgcgcaggccaaactcggtgtgatgtatgcaaatggtctcggggtaaatcaggattatcagcaatcaaaattatggtatgaaaaggcggctgcgcaaaatgatgttgatgcgcaatttttgcttggggagatgtatgacgatggtctcggggtaagccaagactaccagcatgcaaagatgtggtatgaaaaagcggctgctcaaaatgatgagcgtgctcaggtcaatctcgctgttctatacgcaaagggtaatggtgttgaacaggattatcgacaggccaaaagctggtatgaaaaggctgcagctcaaaatagtcctgatgcgcagttcgctcttggaattctgtatgccaatgctaatggtgtagagcaggactatcagcaggcaaaagactggtatgagaaagcagcagaacaaaatttcgccaatgctcagtttaatcttggtatgctctattacaaaggtgagggtgttaaacaaaactttcggcaagccagagaatggtttgaaaaagccgcatctcaaaatcagccgaatgcccaatataatttaggtcagatttattactacggtcagggtgtgactcagagctatcgacaggcgaaagactggtttgaaaaagcggcagagaaaggtcatgtcgatgctcaatataatctcggtgtaatatacgaaaatggtgaaggtgtgagtcagaactatcaacaggcaaaggcttggtatgaaaaggcagcctcacaaaatgatgcgcaggcgcagttcgaacttggcgttatgaatgaactgggtcagggtgaaagcatagacctgaaacaagcaagacattactatgagcggtcatgtaataatgggcttaagaaaggttgtgaacggttaaaagagttattatacaaatagatattataatatttattatatgaggttgtgaattaatggcaatccctgaacgtatgatccccgtaaaagtcagcagcaaaaaaataagagaattagcacagaaagctaaagagatacttgcagctattgatagtggagcaagtgaagaagatgcttttttaaaggacatgatcgatgactggaacagtcaggtagtatgtccatgtgagttttcagattttagagattattcctcttggacaaatgcaaatgaatttacacgaatagcttttaatttggaaaagttctacgaggattttacttgggaggaactggttcaaacgataagctgtgtatgtgatcaaaagtcaaacgaatcggaaaaaatttttgctcttttgttgcttgaaaagaattttcatggaaatccatccgatcttatattctggcccgatgaatggtttcaggatccagatatgttagatgttgaactgagtgttgaagagattgcatgctatttgatggttcgatccggtaggcaactagttgatgcacctgaaatcgacctgaaatatcaaataccccagtctgacgaataaaaaattaatataagtgtagataaatagttatgagcaattacaggaaaaacaagtgtgaaaaaaactgatattgccctgtaaatttaattaattataatgtcccacacttacatggtggagaatatcattgggggcggagtaagaataaaagagttaattctgagcatccatacattttacctatgtcaggtaaaataaactatgggcttgattattcaccattattcatgtttctactaagaaaaacaggtgaaaaatcggatcaagtttatagtgaagcgattctacgactcgatctgcctgatccaaccttctttctagttgctctacacgaaacagaccaaagaaattttgttcggtgcggcaaatccagttattacaatgggctgtatgttgatgagaatggttacttgaaatgttttctccagatttaaaggcatcaggcataccaatattatgtaagtgctgtacttacactctaaacgggaaattattaaatgaataagttgaaatttttctgaccttattaacttaaagaatagacgcatcaattgttttatttcagggcgttaaacacattgtatttataattatgcaaaatttaccaatgttttaacagatccgatagtagctattgttgttttcggagtttggccctgagctgtccatgcctttttagaattatcagtatcaatagatggtaatacctccaattagttgaattaggggtataatagtcgcttttaaggttcttccatggtcacagttaaccttcattgtccctgttgccagcccgttcaggtttaccgtccaatagagttatacttagctgaacctagatttttagcttcgggtatttaaaaataggtattaagaagattgctaactttattgataataacttaaactgtttttagggagcataattaaatgtaattttaggtttgtaatttattatgtttttttgatatgcaaaaatataatgcgagtagaggtacgataaataatatacaaaacattaatacgaataagaataaattccttgatgatccagtatcactaaaaaatctatcccaggatttctttggtattatcttttgcgctgatatttctaaagcataatatgcaaacgggtatgctacagcaccaatagcaaggtatgctgcaacataaggtatataaggaatataagaaggaaatatctttccatcctttaaatcagtcaaaatgttgtaaaccaaagagccacaaccgactaagccccataaacaatgtctgagatagtatctaaatgtcatattatataccttaatgatatgaaatagggtacatatggattcaagtaggcagtttccgcaaactgaaagccattaactctgataggccgctatgagtgggccatttgggttttgcccatgatcacagtcatagttctggaaaatggctgtgctctttaaataaatgtctttaactcctcagtgtttatattcgccagcattgaagcctttaaatgtgggaatgtacgaggtatctggaaatcagtttaaaacctttggtatattccagccatcttggcaagtccccggttccgaacaaccaagcgttacaatcgtaatcagtactataccagttttcaagcaaatgcagcctgtacggttgaacaatatctgatgtgagtttttctctggggtcaggttcaccagcaaaaagctcaagcgaaaagtgccctgcaagcccttcagagactatgacttctcctaaagttgagccgtatctcggcccatctaacagcacgatgcagttcatgtgcaaacattcgagcaatggagtgcgcataatttttgcaaaattatggattttctggagctactgttctatagacaactccagcttcagggtaaaaaccatgatgccctttctccgggaggacaagtttccctactttaaccaccacgtccagtgaaggaatcggcattaaccttttaactagttcgtaggtatcagtcaggttgatttgaagccattcatagtgagcagtgagtttcttttgggtattaagaaaatagaggggcatttgagacataacggtaccactcaaaagagtcagtaaatcgctacatgttaacacacaacgtaaatgttgtggtgtaagcacagtagtagaggaccagactgttacccatcatacctgctcttagggcagagcaaacccaaaccatcaaaatagctctggcttttgtgtcatagctgtctcaggttaagtctgagctaatatattaattaaaacagtccattcgccatgtattattaaatagttagttaccatttgataattaatatgaaattacttcacaggaatctctctattattatttattcgtttttatccttcaggtaataggtcttcatataggtcaagcgatgaccattaaacatatagcctgggttaataaagtaatagttctgtatcatggtctctgcaataaacttcttgtcagcaagttctttcatgcctttgaaatattttttctggatctttttacaacatcttgatcgacaatattccatatagctggaaaaattttcgctgataaaacggttgaaaagtgcgcccaaaatgtactgtttaaaatcccatccgtcgacagaccctctgacatcattgaccatttgccctatcaggtgttgcagccctgctcgttattgaatgcctgtcatttttaattcgttttcctggttcaggtatgaatcatcaggggctattctacagcaaacgcgtggctcaggtagcccgtaagtaagtcggtggactccgggttattcatggcagggaggcgtggccgaatacttctctcctttgctgtatgtctggcacatcctaaataatttcagacagatattatctccgtgaatcccccgccacctttccggtgcgcggggttttgtctttttttaccgggaatacatgtatgaatccgtctgatgccattgaggcaattgaaaaaccgctctcctccctgccttattcactttcccgtcacatcctggaacatctgcgcaaactcaccagccacgaacccgtgattggcattatggggaaaagcggggccggtaaatcctcactctgtaatgcactgtttcagggggaggtcaccccggtcagtgatgttcacgctggcacccgggaagtgcggcgcttccgtctgagtggccacggtcacagcatggttatcactgacctgcccggggtgggcgagagccgggacagggatgcagagtatgaagccctgtaccgtgacattctgccagaactggacctggtactgtggctgattaaagccgatgaccgtgccctgtctgtggatgagtatttctggcgacacatcctgcaccggggacatcagcgggtactgtttgtggtgacgcaggccgataaaacggagccctgccatgaatgggatatggccggtattaagccttctcccgcacaggcacagaatattcgcgaaaaaacggaggcgctattccgtctgttccggcccgtacatccggttgttgccgtatcggcccgcaccggctgggagctggatacgctggtcagtgcgctcatgacagcgcttcccgaccatgccgccagtcccctgatgacccgcctgcaggacgggctgcgcacggagtctgtccgctctcaggcccgtgaacagtttaccggtgcggtggaccggatatttgacacagcggagagcgtctgtgttgcctctgttgtccgtacggccctgcgcgctgttcgtgacaccgtggtctctgttgcccgcgcggtatggaactggattttcttctgaacctgttgtagatgatgccctccctgcctctgagccatctcacaaaaagcgcggttttcattgccacctttcttgtccgtgcaacaatcaggtaatagaataaaacgatcgataactatttaatcgatcgtttatatcgatcgttatgctaataataacacccgttagcaatgtatgcagacacacagacatgagattcagggaacaacagagccacacgtcagaaacttccatcagccggatctgcggcactgtaacccttcacctgcaggtatccacatttgtggataccggctttttattcaccctcactctgataaggaaatgctgatgaaacgacatctgaataccagctacaggctggtatggaatcacattacaggcgctttcgtggttgcctccgaactggcccgtgcacgggggaaacgcgccggtgtggcggttgcactgtctcttgccgctgccacgtcactcccggcgctggctgctgactctgttgtaccggcaggagaaaccgtgaacggtggaacgctgataaatcacgaccgccagtttgtctcaggtacggctgatggaatgactgtcagcaccggactggagctgggggcggactctgataacaacaccggcggtcagcagatagcccggggtggaacagccagaaacaccagagtcaccgcaaacggtctacaggatgtcatggcaggtggcagtacctcggatacggttatcagtaccgggggagggcagaatttgcgtgggaaggcttccggtactgtccttaacggcggtgatcaatggatacatgcaggcggcagggcatccggaacggtgattaaccaggatggttaccagaccattaaacatggcggactggtaaccggaaccatcgtcaacaccggtgcagaaggtggtccggattctgaaaatgtgtccaccggtcagatggtcggggggattgctgaatccaccaccataaacaaaaatggccggcaggttatctggtcttcggggatagcccgggacactctcatttacacaggaggtgaccagacggtacacggagaggcacataacacccgactggagggagggaaccagtatgtgcacaagtatggacttgcactgaacacggtaattaacgaggggggctggcaggttgttaaggccggtggtactgccggtaacaccaccataaatcagaacggcgagctgagggttcatgccggcggtgaagcgtctgatgtcacccagaacacgggaggtgcactggttaccagcactgctgcaactgtcaccggtacaaaccgcctgggagcattctctgttgtggagggtaaagctgataatgtcgtactggaaaatggcggacgtctggatgtgctgagcggacacacagccaccagaacccttgtggatgatggcggaacgctggatgtccgcaacggtggtaccgccactgccgtatccatgggaaatggcggggtactgctggccgattccggggccgctgtcagtggtacccggagcgacggaacggcattccgtatcgggggcggtcaggcggatgccctgatgctggaaaaaggcagttcattcacgctgaacgccggtgatacggccacggataccacggtaaatggcggactgttcactgccagagggggctcgctggcgggcaccaccacgctgaataacggtgccacgtttacccttgccgggaagacggtgaacaacgataccctgaccatccgtgaaggtgatgcactcctgcagggaggcgctctcaccggtaacggcagggtggaaaaatcaggaagtggcacactcactgtcagcaacaccacactcacccagaaagccgtcaacctgaatgaaggcacgctgacgctgaacgacagtaccgtcaccacggatatcatcgctcatcgcggcacggccctgaagctgaccggcagcacagtgctgaacggtgccattgaccccacgaatgtcaccctgacatccggtgccacctggaatatccccgataacgccacggttcagtcggtggtggatgacctcagccatgccggacagattcatttcacctccgcccgcacagggaagttcgttccgacaactctgcaggtgaaaaacctgaacgggcagaatggcaccatcagcctgcgtgtacgcccggatatggcgcagaacaatgctgacagactggtcattgacggtggcagagcaaccggaaaaaccatcctgaatctggtgaacgccggcaacagtggtacgggtctggcgaccaccggtaagggtattcaggtggttgaggccattaacggtgccaccacggaggaaggggcttttgtccaggggaatatgctgcaggccggggcctttaactacaccctcaaccgggacagtgatgagagctggtatctgcgcagtgaagaacgttatcgtgctgaagtccccctgtacgcctccatgctgacacaggcaatggactatgaccggattctggcaggctcccgcagccatcagaccggtgtaaacggtgaaaataacagcgtccgtctcagcattcagggcggccatctcggtcacgataacaacggcggtattgcccgtggggccacgccggaaagcagcggcagctatggcttcgtccgtctggagggtgacctgctcagaacagaggtcgccggtatgtcactgacgacaggagtgtatggtgctgcaggccattcttccgttgatgttaaggatgatgacggctcccgcgccggcacggtccgggatgatgccggcagcctgggcggatatatgaacctgacacacacctcctccggcctgtgggctgacattgtggcacagggaacccgccacagcatgaaagcgtcatcggacaataacgacttccgcgcacggggccggggctggctgggctcactggaaaccggtctgcccttcagtatcactgacaacctgatgctggagccacggctgcagtacacctggcaggggctttcgctggatgacggtaaggacaacgccggttatgtgaagttcgggcatggcagtgcacagcatgtgcgtgccggtttccgtctgggcagccacaacgatatgacctttggtgaaggcacctcatcccgtgcccccctgcgtgacagtgcaaaacacagtgtgcgtgaactgccggtgaactggtgggtacagccttccgttatccgcaccttcagctcccggggtgatatgcgtgtggggacctccaccgcaggcagcgggatgacgttctctccctcacagaatggcacttcactggatctgcaggccggactggaagcccgtgtccgggaaaatatcaccctgggcgttcaggccggttatgcccacagcatcaacggcagcagcgctgaaggttataacagtcaggccacactgaatgtgaccttctgataattctgcattgcctctctgtggtcccggtcatcatgaccgggacccggacgggggaaaacgtttcagtgccacattcactgacattcacaataacatgatattcatcacggagtgactatgttacagatagtcggcgcgctgattctgctgatcgcaggatttgccattcttcgccttttgttcagagcattaaccagcacagcgtctgcgctggcagggttcatattgctgtgtctgttcggtccggctttactggctggctatatcactgaacgcataacccggttattccatattcgctggctggcaggcgtatttctgacgattgccggaatgatcatcagcttcatgtggggacttgatggtaaacatatcgcactggaggctcatacttttgactctgtaaaatttattctgaccaccgctctcgccgctggtctgctggctcttcccgtgcagataagaaccattcagcagaacgggctcacacctgaagatatcagcaaggaaattaacgggtattactgctgtttttatactgcttttttccttatggcgtgttctgcatacgcaccattgatcgcattgcagttcgatatttcaccctcactgatgtggtggggcgggttgttgtactggctggctgcattagtgacgctgctatgggcggccagccagatccaggcgctgaaaagactgaccagtgccatcagccagacactggaagaacaaccggtgctcaacagtaaatcgtggctgagcagtttgcaaaacgattacagccttcctgaaacgctgacggagcgcatctggctgacactcatttcacaacggatttcccggggagaactgagggaatttgaactggcagacggaaactggctactggacaatgcctggtatgaaagaaacatggcgggtttcaacgaaaagctgagagagagcctgtcatttacccctgatgaactgaaaaccctcttccggaaccgcctgaatttatcaccggaagcgaatgacgattttctcgatcgttgcctggacggcggtgactggtaccccttttcagaaggccgccgttttgtatcattccaccacgtggatgagcttcgtatctgtgcctcctgcgggctgacagaagtacatcatgccccggaaaatcataagccggatccggaatggtactgctcctctctttgtcgcgaaacagaaacactgtgtcaggacatttatgaacgttctcacaccggttttatttccgatgcaacggcgaatggtctgattctcatgaaactgccggaaacctggagtacaaatgagaaaatgtttgcttccggagggcagggacatgggtttgccgctgaacggggaaaccatattgtcgacagagtccgtctgaaaaacgcacggatcctcggtgataataatgccagaaatggagcagacagactggtcagcggaacagaaatccagacgaaatattgttcaactgcagtccgtagcgtcggtgcggcattcgacggacaaaacggacagtatcgttacatgggaaatcatggtcccatgcaactggaagtcccccgtgatcagtatgccggcgctgtggaaaccatgaagaataagatccgcgaaggtaaagtacccggtgtaaccgatcccgcagaagcgtcccggctgattcgtcggggacatctgacttatacccaggcccgtaatatcacccggttcgggaccatcgaatcggtcacttatgatattgccgaggggtcggttgtcagtctggcggccggagggatcagttttgccctgacggcatcggtcttctggctcagcaccggcgatcgcgatgctgccctgcagacagctgctgtccaggcaggaaaaaccttcacccgcacactggctgtctacgtcacaacccagcaacttcaccggctcagtgttgttcagggtatgctgaagcatattgatttttcgacggccagcccgactgtccggcaggcgcttcagaaggggaccggtgcaggaaatatcagtgccctgaacaaagtgatgaagggtacgctggtgacatctctggcactggtagctgtcacaaccggccctgacatgatcaaaatgttgcggggacggatctccggtgcgcagttcatcaggaatcttgccgtggcatcttccggtgtggcaggtggagctgtcgggtcagtggcgggcgggatattgttcagtccactgggaccatttggtgcactgacagggcgtgtggttggtggtgttctggggggaatgattgcctccgctgtatcaggaaaaattgccggagcgctggttgaagaagatcgcgtcaaaattctggcaatgattcaggagcaggtgacatggcttgccggcagtttcctgctgaccggacatgagattgaaaatctgaacgcgaatctggcccgtgttatcgatcagaatgctctggagatcattttcgccgccggtatacaacaacgggccgcgaccaacatgttaatcaaaccactggtggtcagtatcatcaggcaacgccccgtcatggaatatgatgcatcccatctcggcaatatggttaaccgactggaagaaacattacccccggagttaccggcataacggctattctgcgccttttacgttttatcacctgatttgtcagtgtcatcgtcatgactcagagaggtaaataccatgattcacctgttcaaaacctgcatgattaccgccttcattctggggttaacgtggtctgccccactccgggcacaggatcaacgttacatcagtatacgcaatacagatacgatatggctcccgggaaatatttgtgcttaccagttccggctggataatggcggaaacgatgaaggatttggccccctcaccatcactctgcaactcaaagacaaatatggtcagacgctggtgaccagaaaaatggaaacggaagcctttggtgacagtaatgccacgcgaaccacagacgcatttctggaaacggagtgcgtggaaaatgtcgccacaaccgaaatcattaaagcaactgaagaaagtaacggccatcgtgtcagtctgccgttatcggttttcgatccccaggactaccatccactgctgattaccgtttccggaaaaaatgttaactgatccctgaagtcagtttcatgcttcagcctctgccacaacgtatggcagaggctatttatcaggagaaaccagatatgccgggttacacacagagtatgtcctggctgaaggatctttctcatacgggcaggcggttgctgtcataaccgcttaccacaatgtgtttatccaggatgacccgggaatgcatttccgtcgggttatccgcaacgcggaaggtcagcgacgctgacgcagccggaactctgaagctgatgccggaaaacagcttaatgcgtggctcgccagtggagggcttctcagacaataaacctcgtcagtatcatcaggcaacgccccgtcatggaatatgatgcatcccatctcggcaatatggttaaccgactggaagaaacattacccccggagttaccggcataacggctattctgcgccttttacgttttatcacctgatttgtcagtgtcatcgtcatgactcagagaggtaaataccatgattcacctgttcaaaacctgcatgattaccgccttcattctggggttaacgtggtctgccccactccgggcacaggatcaacgttacatcagtatacgcaatacagatacgatatggctcccgggaaatatttgtgcttaccagttccggctggataatggcggaaacgatgaaggatttggccccctcaccatcactctgcaactcaaagacaaatatggtcagacgctggtgaccagaaaaatggaaacggaagcctttggtgacagtaatgccacgcgaaccacagacgcatttctggaaacggagtgcgtggaaaatgtcgccacaaccgaaatcattaaagcaactgaagaaagtaacggccatcgtgtcagtctgccgttatcggttttcgatccccaggactaccatccactgctgattaccgtttccggaaaannnnnnnnnnnnnnnnnnnnnnnnnnnnnnnnnnnnnnnnnnnnnnnnnnnnnnnnnnnnnnnnnnnnnnnnnnnnnnnnnnnnnnnnnnnnnnnnnnnnnnnnnnnnnnnnnnnnnnnnnnnnnnnnnnnnnnnnnnnnnnnnnnnnnnnnnnnnnnnnnnnnnnnnnnnnnnnnnnnnnnnnnnnnnnnnnnnnnnnnnnnnnnnnnnnnnnnnnnnnnnnnnnnnnnnnnnnnnnnnnnnnnnnnnnnnnnnnnnnnnnnnnnnnnnnnnnnnnnnnnnnnnnnnnnnnnnnnnnnnnnnnnnnnnnnnnnnnnnnnnnnnnnnnnnnnnnnnnnnnnnnnnnnnnnnnnnnnnnnnnnnnnnnnnnnnnnnnnnnnnnnnnnnnnnnnnnnnnnnnnnnnnnnnnnnnnnnnnnnnnnnnnnnnnnnnnnnnnnnnnnnnnnnnnnnnnnnnnnnnnnnnnnnnnnnnnnnnnnnnnnnnnnnnnnnnnnnnnnnnntatgttcccagtattttcggtgaagaccggcatacttcccgcagtaaacgatatgcgtacattcccaccatcaccgtactggaaagcctgcagcgggaaggctttcagccattcttcgcctgccagacccgtgtgcgcgacccgggccgccggggatacacnnnnnnnnnnnnnnnnnnnnnnnnnnnnnnnnnnnnnnnnnnnnnnnnnnnnnnnnnnnnnnnnnnnnnnnnnnnnnnnnnnnnnnnnnnnnnnnnnnnnnnnnnnnnnnnnnnnnnnnnnnnnnnnnnnnnnnnnnnnnnnnnnnnnnnnnnnnnnnnnnnnnnnnnnnnnnnnnnnnnnnnnnnnnnnnnnnnnnnnnnnnnnnnnnnnnnnnnnnnnnnnnnnnnnnnnnnnnnnnnnnnnnnnnnnnnnnnnnnnnnnnnnnnnnnnnnnnnnnnnnnnnnnnnnnnnnnnnnnnnnnnnnnnnnnnnnnnnnnnnnnnnnnnnnnnnnnnnnnnnnnnnnnnnnnnnnnnnnnnnnnnnnnnnnnnnnnnnnnnnnnnnnnnnnnnnnnnnnnnnnnnnnnnnnnnnnnnnnnnnnnnnnnnnnnnnnnnnnnnnnnnnnnnnnnnnnnnnnnnnnnnnnnnnnnnnnnnnnnnnnnnnnnnnnnnnnnnnnnnnnnnnnnnnnnnnnnnnnnnnnnnnnnnnnnnnnnnnnnnnnnnnnnnnnnnnnnnnnnnnnnnnnnnnnnnnnnnnnnnnnnnnnnnnnnnnnnnnnnnnnnnnnnnnnnnnnnnnnnnnnnnnnnnnnnnnnnnnnnnnnnnnnnnnnnnnnnnnnnnnnnnnnnnnnnnnnnnnnnnnnnnnnnnnnnnnnnnnnnnnnnnnnnnnnnnnnnnnnnnnnnnnnnnnnnnnnnnnnnnnnnnnnnnnnnnnnnnnnnnnnnnnnnnnnnnnnnnnnnnnnnnnnnnnnnnnnnnnnnnnnnnnnnnnnnnnnnnnnnnnnnnnnnnnnnnnnnnnnnnnnnnnnnnnnnnnnnnnnnnnnnnnnnnnnnnnnnnnnnnnnnnnnnnnnnnnnnnnnnnnnnnnnnnnnnnnnnnnnnnnnnnnnnnnnnnnnnnnnnnnnnnnnnnnnnnnnnnnnnnnnnnnnnnnnnnnnnnnnnnnnnnnnnnnnnnnnnnnnnnnnnnnnnnnnnnnnnnnnnnnnnnnnnnnnnnnnnnnnnnnnnnnnnnnnnnnnnnnnnnnnnnnnnnnnnnnnnnnnnnnnnnnnnnnnnnnnnnnnnnnnnnnnnnnnnnnnnnnnnnnnnnnnnnnnnnnnnnnnnnnnnnnnnnnnnnnnnnnnnnnnnnnnnnnnnnnnnnnnnnnnnnnnnnnnnnnnnnnnnnnnnnnnnnnnnnnnnnnnnnnnnnnnnnnnnnnnnnnnnnnnnnnnnnnnnnnnnnnnnnnnnnnnnnnnnnnnnnnnnnnnnnnnnnnnnnnnnnnnnnnnnnnnnnnnnnnnnnnnnnnnnnnnnnnnnnnnnnnnnnnnnnnnnnnnnnnnnnnnnnnnnnnnnnnnnnnnnnnnnnnnnnnnnnnnnnnnnnnnnnnnnnnnnnnnnnnnnnnnnnnnnnnnnnnnnnnnnnnnnnnnnnnnnnnnnnnnnnnnnnnnnnnnnnnnnnnnnnnnnnnnnnnnnnnnnnnnnnnnnnnnnnnnnnnnnaaaacctgcatgattaccgccttcattctggggttaacgtggtctgccccactccgggcacaggatcaacgttacatcagtatacgcaatacagatacgatatggctcccgggaaatatttgtgcttaccagttccggctggataatggcggaaacgatgaaggatttggccccctcaccatcactctgcaactcaaagacaaatatggtcagacgctggtgaccagaaaaatggaaacggaagcctttggtgacagtaatgccacgcgaaccacagacgcatttctggaaacggagtgcgtggaaaatgtcgccacaaccgaaatcattaaagcaactgaagaaagtaacggccatcgtgtcagtctgccgttatcggttttcgatccccaggactaccatccactgctgattaccgtttccggaaaannnnnnnnnnnnnnnnnnnnnnnnnnnnnnnnnnnnnnnnnnnnnnnnnnnnnnnnnnnnnnnnnnnnnnnnnnnnnnnnnnnnnnnnnnnnnnnnncacntggtagctgtcacaaccggccctgacatgatcaaaatgttgcggggacggatctccggtgcgcagttcatcaggaatcttgccgtggcatcttccggtgtggcaggtggagctgtcgggtcagtggcgggcgggatattgttcagtccactgggaccatttggtgcactgacagggcgtgtggttggtggtgttctggggggaatgattgcctccgctgtatcaggaaaaattgccggagcgctggttgaagaagatcgcgtcaaaattctggcaatgattcaggagcaggtgacatggcttgccggcagtttcctgctgaccggacatgagattgaaaatctgaacgcgaatctggcccgtgttatcgatcagaatgctctggagatcattttcgccgccggtatacaacaacgggccgcgaccaacatgttaatcaaaccactggtggtcagtatcatcaggcaacgccccgtcatggaatatgatgcatcccatctcggcaatatggttaaccgactggaagaaacattacccccggagttaccggcataacggctattctgcgccttttacgttttatcacctgatttgtcagtgtcatcgtcatgactcagagaggtaaataccatgattcacctgttcaaaacctgcatgattaccgccttcattctggggttaacgtggtctgccccactccgggcacaggatcaacgttacatcagtatacgcaatacagatacgatatggctcccgggaaatatttgtgcttaccagttccggctggataatggcggaaacgatgaaggatttggccccctcaccatcactctgcaactcaaagacaaatatggtcagacgctggtgaccagaaaaatggaaacggaagcctttggtgacagtaatgccacgcgaaccacagacgcatttctggaaacggagtgcgtggaaaatgtcgccacaaccgaaatcattaaagcaactgaagaaagtaacggccatcgtgtcagtctgccgttatcggttttcgatccccaggactaccatccactgctgattaccgtttccggaaaaaatgttaactgatccctgaagtcagtttcatgcttcagcctctgccacaacgtatggcagaggctatttatcaggagaaaccagatatgccgggttacacacagagtatgtcctggctgaaggatctttctcatacgggcaggcggttgctgtcataaccgcttaccacaatgtgtttatccaggatgacccgggaatgcatttccgtcgggttatccgcaacgcggaaggtcagcgacgctgacgcagccggaactctgaagctgatgccggaaaacagcttaatgcgtggctcgccagtggagggcttctcagacaataaacctcattgatttcatccatcaggccgcgtcttctccgggagacgcggcttttttcatttattgcaccagtaaatcttaaccaccgataaggagcaaagtatgcgattagccagtcgttttggttatactgcaaaccagatacgtcgtgaccgtccactgacacatgaagagctgatgcaccatgtgccggggattttcggggaagagaaacacacgtcccgaagccagaactatacgtacatccccaccatcaccgtactggaaagcctgcagcgggaaggctttcagccattcttcgcctgccagacccgtgtgcgcgacccgggccgccggggatacaccaaacacatgctgcgtctgcggcgggccggagagataaacggagagcatgtccctgaaattattctgctcaactctcatgacggtacctccagctaccagatgctgccgggttacttcaggttcgtctgccagaacggctgcgtctgtggtcagtctctgggggaagtgcgtgttccacaccggggagacgtagtggagaaagttattgaaggggcttacgaggtggtgggcgtgtttgaccggatagaggagaagcgtgatgccatgcagtcgctggtcctgccgccaccggcacgccaggcgctggcacaggcggcactgacttaccgttatggtgacgaacatcagcccgtcaccaccgccgacattctgacgccacgacgccgggaggattacggtaaggacctgtggagtgcttatcagaccatccaggagaatatgctgaaaggcgggatttccggtcgcagtgcaaaaggaaaacgtatccatacccgggccattcacagcattgataccgacattaagctcaaccgtgcattgtgggtgatggcagaaacgatgctggagagcctgcgctgatgcaatctgtccctgaaggcgtgattcaggcaccagaatcacccgacgccccggagagntcagtctgtgcagactgagtacaggcaatggcatctggccatccgtctgtgaccggaacggttacgcgtacggctgtccggaatttcagccgaatatcattcatccctganattaccgggtctcacggtcagtgatgaacgtgatgttgncagcncccgncctttactccctctcatttattcacattacaaggatttcatacatgaaaacattgtctcagaacaccacctcttcggcctgtgcaccggagactggcctgcaacaactggttgccaccatagtccctgatgaacagcgcatcagcttctggccgcagcattttggcctcattccacagtgggtgaccctggagccccgngtcttcggctggatggaccgtctgtnngaanactactgcggtggtatctggaatctgtacaccctgaacaacggnggngcatttatggcnccngaaccggatgacgatgatgacgaaacatgggtnctgttnaangncatgaacggtaaccgcgctgaaatgagcccggaagccgccggcattgccgcctgtctgatgacgtacagtcatcacgcctgccgtacggagtgttatgccatgacggttcattattaccgtctgcgggattacgccctgcagcatccggaatgcagcgccattatgcgcatnatngactgaanggnggcaggnacaatgcancagntttcctttctgcccggagaaatgacnnccngngagcgcagnctcattctgcgggccctgaaaaccctggaccgccatcttcatgaacccggcgtggccttcacctccacccgtgcggcacgggaatggctgattctgaacatggcgggactggagcgtgaagagttccgggtgctgtatctgaataaccagaatcagctgattgccggtgaaaccctcttcaccggcaccatcaaccgcacggaagtccatccccgggaagtgattaaacgcgccctgtatcacaatgccgcagccgtggtgctggcacanaatcacccgtccggtgaagtcacncccagnaaggcagaccgncttatcacggaacgtctggtacaggcactgggcctggtggatatccgggtgccggaccatctgatagtcggtggcagccaggttttctcctttgccgaacatggtctgctttaacccgtcacaaccacatcacacctgttttcacttttatcttctgtcttcagaggtatcccattatgaaaatcatcacccgtggtgaagccatgcgtattcaccaacagcatcctgcatcccgtctttttccgttctgtaccggcaaataccgctggcacggcagcactgaagcgtataccggtcgtgaagtgcaggatattcccggtgtgttggccgtgtttgctgaacgtcgtaaggacagttttggcccgtatgtccggctgatgagcgtcaccctgaactgaatcaggacgggcattcagatgagcagcattatcaccatcacagtgtatacgctggatgaactttcctgcccggcacggggaaaagcccgcgactggtaccgtcagcatcatgctgacagcaactggtatgaaaacgtgtatgaagacttcagggaggtctgtggcattttcgggattgacctccgccagcgcgttttccggctcagcaatggcaggtttatggaagagccgtgcatctggttcagcggattctgcagccagggggacggagcctgttttgaagggcgctggcactggcagccagcgacaccccggaaaatcagggaatatgcccctcaggaccgtgagcttcatcgtatcgcggataccctgcaggcggtgcagaaacgtaacttctggcagcttcaggctgaaatcagtcaccggggacgttactgccatccgtacagcatggatatcaccgtcacccggaacagtccgactggtcaggcaatgacaaccgatgcggaagccgctgtcagcgaagccctgcgcgacctggccttctggttgtaccgtcaactggaaaacgagtacgactggctgacctcagacgccgctgtggatgaggccctgctcatcaacgaatacaccttcaccgaagccggtctgtgcaccggctgacccgtcatcgttaaactatcattcaccgattttctgtgaggactttatcgtgtcagacacgctccatgaaacaaattatcccgacgacaacaacgaccgcccctggtgggggctaccctgcaccgtgacgccctgtttcggggcacgtctggtgcaggagggcaatcagttgcattaccttgccgaccgcgccggtatcagagggcagttcagcgacgcggatgcataccatctggaccaggcttttccactgctgatgaaacaactggaactcatgctcaccagcggtgaactgaatccccgccatcagcataccgtcacgctgtatgccagagggctgacctgcgaagccgacaccctcggcagctgtggttacgtttatatggctgtttatccgacactggcacccgcaaccacctcataaccccgaatatctcacctttagcactaccagttacagagaacttaagatgaaaacattacctgacacacacgtacgggaggcatcgcgctgcccgtctcccgtcaccatctggcagacactgctcacccgactgttggaccagcattacggcctcacactgaatgacacaccgttcgctgatgaacgtgtgattgagcagcatattgaggcagggatttcactgtgtgacgcggtgaactttctcgttgaaaaatacgcgctggtacgaactgaccagccgggattcagcgcaggagtcccgtcgcagttaatcaacagcatcgatattctccgggcccgccgggcaaccggcctgatgacccgcgacaattacagaacggtaaatgacattaccctgggcaggcatccggaggaggcgaaacaatgaacctttccctgacgccggaggccgacggcattaacgtacaggcgatgaacatggggcgcattgtcgttgacgtcgatggtgttaattttgctgaactgattaacgtggcctgcggcaatggctactcccttcgtgttgttgatgaatctgaccggaccgcaactgacagcatgccaccctccgctgccctgagcggtatacgctgcagcacctcacatatcacggaaacagacaacgcttggctgtactcgctgtcgcatcagacgaatgacaccggcgaatcagaatggattcattttacaggcagcggatatctgttacgtaccgatgcgtggtcatacccggttctgcggcttaaacgcctgggcctgtcaagaacgttccgtcgtctggtcgtcactctcacccggcgttatggcgtcagtctcattcatctggacgccggcgcagaatgtctgccgggtttacccactttcgactggtaatcaggacaaaagacactggatgaaattattaaccacagaaacggcgctggatattctgattgcgtggctgcaggacaatattgactgcgaatcagggattatcttcgacaacgatgaggataaaacggattcggcagcactgttgccctgtattgaacaggctagggaggatatccgtatcctgcgccaactgcagtttctgcaacaaaaccggtgagtctcactcaccatacttcattccactgacgccagcctgaacagggctggcgttttcatttatctgcgaaaaggaatatcgattatgtctgcaatcacagtctcccgtccggaagtggtcaacgggcatacggacgttatctgctcaaccagtatccgccacattctggctgtacgaaagagtacactgctgcaaatcgacacacttatccggcaactggctgaaatctcatcaatgacagaaagtattggcggtaaaaccgcactggactgggccatgaaacaggattttcgctgtggttgctggctgactgagaaaccggaaaccgcaatgaaagccattacccgcaaccttgaccgtgaaatctggcgtgacctgatgcaacgctccgggatgctgtcattaatggatgcgcagacccgtgatacatggtaccgatcactggagtacgataattttccggaaatcagtgaagagaatattctgagtacgtttgagcagctacaccagaataaggatgaagtgtttgagcgaggagtgatcaacctcttcagagggttgagctggaattacaaaaccaattgcccctgtaaatttggcaataaaattatcgtcaacaatctggtgaggtgggaccggtggggattgcatcttatcaccgggcaacaggcagatagacttgccgacctggaaagaatgctgcatctgttcagcggcaaaccgatccccgacaacagggaaaacataactattcatctggacgatcacatccggtctcttcagggaaaagaatgctatgaagatgagatgttcattattaaatactttaagaagggctctgcgcacatcacgttcaggaagccagaactggttgacagactgaatgatattatcgcaagaacactatcctgacatgctggcagtatagctttgccagtatgctcaaagctcggaaattgtccgataagatatgatcgtggggcatataaaccggtttcagatggcatacccggtggcatactgtctggaaggataaataaaaaagcgcatgttaaacaataacatgcgcttgtaatctggcggtgagggggggattcgaacccccgatacgttgccgtatacacactttccaggcgtgctccttcagccactcggacacctcaccaaattgttgttcctgtcttgctggaacgggcgctaatttagggaaatcatgacctgaggtcaacaaacttttttaaaaaatcgcgcgtttattcaaacttcaatcaatatgcagttttaataagcgaaatctgctttttttgccaccgaccacggatttgttatgctggtggcctttgtagatcataacgataagtgcgaataaattttgcgcaacgcttttcgggagtcagtatggacatcatcttttatcacccaacgttcgatacccaatggtggattgaggcactgcgcaaagctattcctcaggcaagagtcagagcatggaaaagcggagataatgactctgctgattatgctttagtctggcatcctccagttgaaatgctggcagggcgcgatcttaaagcggtgttcgcactcggggccggtgttgattctattttgagcaagctacaggcacaccctgaaatgctgaagccttctgttccactttttcgcctggaagataccggtatgggcgagcaaatgcaggaatatgctgtcagtcaggtgctgcattggtttcgacgttttgacgattaccgcatccagcaaaatagttcgcattggcaaccgcttcctgaatatcatcgggaagattttaccatcggcattttgggcgcaggcgtactgggcagtaaagttgcacagagtctgcaaacctggcgcttcccgctgcgttgctggagtcgaacccgtaaatcgtggcctggcgtgcaaagctttgccggacgagaagaactgtctgcatttctgagccaatgccgggtattgattaatctgttaccgaatacccctgaaaccgtcggcattattaatcaacaattaatcgaaaaattaccggatggcgcgtatctcctcaacctggcgcgtggtgttcatgtcgtggaagatgacctgctcgcggcgctggatagcgggaaagttaaaggcgcaatgttggatgtttttaatcgtgaacccttaccgccggaaagtctgctctggcaacatccacgcgtgacgataacaccacatgtcgccgcgattacccgtccagctgaagctgtggagtacatttctcgcaccattgcccagctcgaaaaaggggagaggctctgcgggcaagtcgaccgcgcacgcggctactaataaagcatctggtttcctgctatccttggcgggaattgaatacaggagagagttatgtatcccgtcgaccttcatatgcataccgttgccagcacgcatgcatatagcacattgagtgattacattgcccaggccaaacaaaagggcattaaactttttgcgatcaccgatcatggcccggatatggaagatgcgccgcatcactggcacttcattaacatgcgtatctggccgcgagtggttgatggggttgggatcctacgcggcatcgaagctaacattaaaaatgttgacggtgaaattgactgcagtggcaaaatgtttgattcgctggatctgattattgccggttttcatttaatggatgcgcagacccgtgatacatggtaccgatcactggagtacgataattttccggaaatcagtgaagagaatattctgagtacgtttgagcagctacaccagaataaggatgaagtgtttgagcgaggagtgatcaacctcttcagagggttgagctggaattacaaaaccaattgcccctgtaaatttggcaataaaattatcgtcaacaatctggtgaggtgggaccgtggggattgcatcttatcaccgggcaacaggcagatngactngcngacctggaaagaatgctgcatctgttcagcggcaaaccgatccccgacancngggaaaanatnannattcnnctggangatcacatccgntcnnttcagggnaaagnntgctatgaagatgagatgttcannatnanatactttaagaagggctcngcncacatcacgttcaggaanccagaactggttgacagnctnaatgatattatcgcaagaacactatcctgacatgctggcagtatagctttgccagtatgctcaaagctcggaaattgtccgataagatatgatcgtggggcatataaaccggtttcagatggcatacccggtggcatactgtctggaaggataaataaaaaagcgcatgttaaacaataacatgcgcttgtaatctggcggtgagggggggattcgaacccccgatacgttgccgtatacacactttccaggcgtgctccttcagccactcggacacctcaccaaattgttgttcctgtcttgctggaacgggcgctaatttagggaaatcatgacctgaggtcaacaaacttttttaaaaaatcgcgcgtttattcaaacttcaatcaatatgcagttttaataagcgaaatctgctttttttgccaccgaccacggatttgttatgctggtggcctttgtagatcataacgataagtgcgaataaattttgcgcaacgcttttcgggagtcagtatggacatcatcttttatcacccaacgttcgatacccaatggtggattgaggcactgcgcaaagctattcctcaggcaagagtcagagcatggaaaagcggagataatgactctgctgattatgctttagtctggcatcctccagttgaaatgctggcagggcgcgatcttaaagcggtgttcgcactcggggccggtgttgattctattttgagcaagctacaggcacaccctgaaatgctgaagccttctgttccactttttcgcctggaagataccggtatgggcgagcaaatgcaggaatatgctgtcagtcaggtgctgcattggtttcgacgttttgacgattaccgcatccagcaaaatagttcgcattggcaaccgcttcctgaatatcatcgggaagattttaccatcggcattttgggcgcaggcgtactgggcagtaaagttgcacagagtctgcaaacctggcgcttcccgctgcgttgctggagtcgaacccgtaaatcgtggcctggcgtgcaaagctttgccggacgagaagaactgtctgcatttctgagccaatgccgggtattgattaatctgttaccgaatacccctgaaaccgtcggcattattaatcaacaattaatcgaaaaattaccggatggcgcgtatctcctcaacctggcgcgtggtgttcatgtcgtggaagatgacctgctcgcggcgctggatagcgggaaagttaaaggcgcaatgttggatgtttttaatcgtgaacccttaccgccggaaagtctgctctggcaacatccacgcgtgacgataacaccacatgtcgccgcgattacccgtccagctgaagctgtggagtacatttctcgcaccattgcccagctcgaaaaaggggagaggctctgcgggcaagtcgaccgcgcacgcggctactaataaagcatctggtttcctgctatccttggcgggaattgaatacaggagagagttatgtatcccgtcgaccttcatatgcataccgttgccagcacgcatgcatatagcacattgagtgattacattgcccaggccaaacaaaagggcattaaactttttgcgatcaccgatcatggcccggatatggaagatgcgccgcatcactggcacttcattaacatgcgtatctggccgcgagtggttgatggggttgggatcctacgcggcatcgaagctaacattaaaaatgttgacggtgaaattgactgcagtggcaaaatgtttgattcgctggatctgattattgccggttttcatgagccggtgtttgcgccgcatgacaaagcgaccaatacgcaagcgatgatcgccactatcgccagcggcaatgtgcatataataagccatcccggaaatccgaaatatgaaatagatgttaaagccgttgctgaagcagccgcgaaacatcaggtggcgctggaaatcaataattcctcttttttacactcacgtaagggaagtgaagacaattgtcgtgcggtagccgcagcggtacgtgacgctggaggttgggtggcattaggctcggattctcacaccgcgtttaccatgggtgaatttgaagagtgtcttaaaatcctcgacgcggtagattttccgccagagcgcattttgaatgtttctccgcgccgcttactgaacttccttgaatctcgcggtatggcaccgattgcggaatttgcagacctttaattactagtaatggaaatatattaatgaacgagttttctatcctctgtcgtgtgctgggttcgctctattaccgccaaccgcaagatcctttactggtgccgctgtttaccctgattcgtgaggggaaactggctgcgaactggccactggagcaggatgagttactgacgcgtttacagaaaagctgtgatatggcgcaagtctctgccgattacaatgcgttgtttatcggcgatgaatgtgctgtgccgccatatcgtagcgcatgggttgagggcgcgacggaagcggaagtgcgcgcttttctttccgaacgggggatgccattagcggatacgccagccgatcacatcggcacattgctgctcgcggcttcctggctggaagatcagtcaacggaagatgagagcgaagcactggaaacactgttcagtgagtatctgttaccctggtgtggtgcgttccttggcaaagtggaggcccatgcaactacgcctttctggcgcaccatggcaccgctaacccgcgatgctattagtgcaatgtgggacgagctggaagaagattctgaagagtaaatgtgatctgcatcactcataactgcaacagataatttgttgttgcataaaatgtgtgctcgatctcattcatggccgcgttttctgctatcatgcgcggcatgaacatacttctctctattgcaatcacaacaggcattctctccggtatctggggatgggtggctgtttccctgggcttactaagctgggcgggcttcctgggctgtacggcctactttgcctgcccgcaaggtgggctgaaagggctggcgatctccgctgcaaccctgcttagtggcgtggtgtgggcgatggtcattatttacggtagtgcactggcaccacatctggaaattctcggttatgtcataaccggtattgtcgcgtttctgatgtgtattcaggccaaacagctgctgctttcatttgttccgggaacgtttataggcgcatgcgcgacgtttgccgggcagggtgactggaaactggtgttaccttcgctggcgctcgggttgatatttggttacgcaatgaaaaacagcggcctgtggctggcggcgcgtagtacgaagaccgctcaccgtgagcagcaaatcaaaaataaagcgtgaggggcactcacgctttcgcttaaacagtaaaatgccggattattaattccggcatttttatctatcaggattccggtggaaccgacatatggcggtatttcaccagaatgtcattctgccgttctgctttgttctgcaaatcccacagaccacggtcaataccatcattaatcaggaaaatgacccctgtttcgatagccgacatcaggcacagcataacgggttcgttcgaggtgtaacccacttccccttccagcaagcgctggtagtcaataaagcggaaaaccccggcctgaacttcataggaaagtatcgtcttactggtgttcaccgaggagaggatctcaccggtactcacattgacgacacgcaggttcacggcaatctgatcaagctggtattgcgtgtctgcaccgatcccaaaatatcttgccccaacaccgcccgatttaacgttgctttcataaccgataattgaaccttcaaccatgatatttgccgccgttaaagattgcagcgggattcggttattaatggcaaccgtgccgttttcttgtgccgcacgaataatcttgcgctcgttaagcagattttgtaagccctggcgctccagcggtataaaccagcgagaatctttcaatgccgtgaccagcattgccgtggcgctttgcggaacagcagtggagaagttacttgccgggtagggtttaaattgcccggtttcgtcctgaatgttgtataccgaaacaaagatcttacccgtcggcgctggcagatgggtcaaatctttgtagctctgagcacgaggcattaatgtcggtctggcggcttctttaggcggggcggttaagcatccgctcagtaacatgacggcaaccaaaagaaataagcgctgcatgattattttccttatgaagctggggcttaaaaatcggttgagttattttgtaaacccgaaacctggatggtcgaggtttgtccggttttacgatctgtcacgttcaactgcaattgaccatcgcggttagcaatatcaacaatataatcgttggtcaccatgcggcccggtttaccggtattaatattcgacagtagcccacccaaaatttgtgactggatggcctgagtaaagttatctaacgccgagggcgtttcaataccaaagtcatcgttatagctcggatctttataagagttttgggcctgagcgctatttaacaaaaaagcgccattatttgggttaccaccaaagtttggattacggaactggaaagtcatggttccagcccaacttaatggcgaaataagcatgagtagaactactgcatgtttgacacgcattgcagcctccgaacaattttttatttaaaattcatcatgcgccaaatcgcccgtacttaataacgcctggtttatctggcgacgatttagtgcttcttcagtttgaatcagtgcaaagacgacagttttctcgaagtctcttttcaacggaaataaaaaagtctggaaaataacgtcctgattcaccgttattgtgatccagcttccccatcgtgcactgggcctttcattaatcgttaagttacccgtatagtcactttcccatttatcactaaaggctcggtaaaaatcatggccaatagatgaaacagtatggtcagttaacaatcccgggacttctacctcaacggcgtgaagattccctgcggcgaacagaaattctgccgccacaatccagcgtaaataacgtttcatggctttatcgcctgaggttatcgtttgcccaggaaaccgcttgtgtccggttttttacggctatcttcttgaaaagattataaagatgcgttttaaccgtattttcgctgatgaacaacgaacgagcgatctcgttattagacgcgccgatacgcagcttattcaggatctctttttcccgatgagtaaggagggctgattccgtgctgttataacgatagttacctgaatgcgtaatcaggtaactggcaagcttttgcgtaaagtagcattcgccgcgcaggacgccttgcaacccattgacaacacgttcttgatcctccatggcataaaaaacgccgttgatatgaggccagttttcaatgtcgcggtacgggtaatcttcaggcgtatttagcaacaatattttgatattgttgtttttcctgctcaaagtatcctgccaataatggataagctttttatccgcttccatcatatccagaagaataatagagcctgaagatatatcgtccagagaacgttgaatattatgtaattttcctgtaattgccagcgattgtttaaggtgctgcaagagagctgtcgcctgcaaagaaggtttagtgatcaacaataatgtatgaccatgaatactatggacttcattaaacatgatgaaaccccgctttttttattgatcgcacacctgacagctgcctctaaaatagaagcaccagaagtactgacagatgttgcactgctgtgtgtagtaataaatcagccctaaatgggtaaaatataaaactaatggattacatctgatttcaatctagccattacaaatcttaaatcaagtgttaaacatgtaactaaatgtaactcgttatattaaaatgttaaccttaaggttttattaagtttataaatgatagaaaagttgtacatttggtttttattgcacaattttaaaaaatcatacaaatggtgctaacttactaataatgcatataaaaaatatttcgctgtagtcctttcgtcatgaaaaacgttcttgttttttctccataccaccgtggacaattttttactgcaaaaagacgaggtttgtcacggcttgtgcgcaagacatatcgcagcaatcagcgacgggcaagaagaatgactgtctggtgatttttgatagcggaaaacggagatttaaaagaaaacaaaatatttttgcgtagataacagcgtatttacgtgggttttaatactttggtatgaacaaaaaaagaaaaatacaacgtgcgggtgagttattaaaaatatttccgcagacatactttccatcgtaacgcagcgttaacaaaatacaggttgcgttaacaaccaagttgaaatgatttaatttcttaaatgtacgaccaggtccagggtgacaacatgaaaaacaaattgttatttatgatgttaacaatactgggtgcgcctgggattgcagccgcagcaggttatgatttagctaattcagaatataactttgcggtaaatgaattgagtaagtcttcatttaatcaggcagccataattggtcaagctgggactaataatagtgctcagttacggcagggaggctcaaaacttttgacggttgttgcgcaagaaggtagtagcaactgggcaaagattgatcagacaggagattataaccttgcatatattgatcaggcgggcagtgccaacgatgccagtatttcgcaaggtgcttatggtaatactgcgatgattatccagaaaggttctggtaataaagcaaatattacacagtatggtactcaaaaaacggcaattgtagtgcagagacagtcgcaaatggctattcgcgtgacacaacgttaatttccattcgacttttaaatcaatccgatgggggttttacatgaaacttttaaaagtagcagcaattgcagcaatcgtattctccggtagcgctctggcaggtgttgttcctcagtacggcggcggcggtggcaaccacggtggtggcggtaataacagcggtccgaattcagagctgaatatttaccagtacggtggcggtaactctgctcttgctctgcaagctgacgcccgtaactctgatctgaccattacccagcacggcggcggtaatggcgcagatgtgggccaaggttctgatgacagctcaatcgatctgactcagcgtggtttcggcaacagcgctactcttgatcagtggaatggtaaagattctactatgactgttaaacagttcggtggcggtaacggtgctgctgttgaccagactgcatctaactccagcgttaacgtcactcaggttggctttggtaacaacgcgaccgctcatcagtactaatacatcatcagtatgaaagaaacagggcgcaagccctgttttttttcgggagaagaatatgaatgcgttattactccttgcggcactttccagtcagataacctttaatacgacccagcaaggggatatgtacaccattattcctgaagtcactcttactcaatcttgtctgtgcagagtacaaatattgtccctgcgcgaaggcagttcagggcaaagtcagacgaagcaagaaaagaccctctcattgcctgctaatcaacccattgctttgacgaagttgagtttaaatatttccccggacgatcgggtgaaaatagttgttactgtttctgatggacagtcacttcatttatcacaacaatggctgccctcttcagaaaagtcttaatttgttgaaatatcgagcataagatgaacctggagagaatggtctgctgcgaatcagccaacctgaaagtatggataacacaaccctcaaggatgattaatcattgaggaaatagaataaatgttcagaccttttttaaactctcttatgctcggcagtttgttttttccttttattgccattgcaggaagcagcgcgcaagggggcgtgatccatttttatggccaaattgtggaaccggcatgtgacgtcagcacccagtcatcacccgtagaaatgaactgcccacagaatggttctgttccgcgtaaaacctattccagcaaagcgttaatgagcggcaatgttaaaaacgcgcaaatagcctcagtaaaagtgcagtatcttgataaacagaaaaagctggctgtaatgaacatcgaatataactaagtttctgaacaactcacgttgctgagcagaaaaatgcgatttaaccaaaaagcctgctgtacacttaggaaacaagaaggtgtaaggaggcgttatgaaaacgcgtattcatgttgtgcagggtgatattactaaactggccgttgatgtgattgtgaatgcggctaatccgtcattaatgggaggcggcggcgtcgatggggccattcatcgcgcagcgggtccggccctgctggatgcctgtttaaaagtcaggcagcagcagggcgattgccctacggggcatgccgttattacgcttgcaggcgatcttcccgctaaagccgtagtgcacaccgtcgggccagtctggcgtggtggtgaacaaaacgaagaccagcttttgcaggatgcctatctcaatagcctacgactggtggcggcaaacagctatacgtcagtggcttttcctgcaatcagtactggggtttatggttacccccgtgcggcagcggctgaaatcgcagtaaaaaccgtttcagaatttattacccgtcacgctttacccgaacaggtatactttgtctgttatgatgaagaaaacgcccacctctacgaaagactccttacccaacaaggagatgaatgatttgcctcagctggcgagcgcggtgctgccactgtgttcgcaacatcccggtcagtgtggactttttcctctggagaaaagtctggatgcgtttgccgcccggtatcgtctggctgaaatggcagagcatacactggatgttcagtattacatctggcaggacgatatgtcgggtcggttactgttttccgccctgttagccgcagcaaagcgtggcgttcgcgtacgtttgttgctggacgacaacaatacgcccggacttgataacattttacgcttgcttgacagccatccacgcattgaagtccggctttttaatcctttctcgtttcgcttgctacgtccgcttggttatatcaccgacttttcccgtctcaatcgccgtatgcacaataaaagtttcactgtcgatggcgtggtgacgctggtgggaggacgaaatattggtgatgcctattttggtgcaggggaagagccacttttttcggatttagatgtcatggcaataggacccgtggtagaggacgttgccgatgatttcgcccgctattggtattgcaaatcggtttcccccttacagcaggtgctggatgtcccggaaggtgaaatggcggatcgcatcgagttaccggcatcctggcatgacgatgccatgacgcatcgttatttacgcaaaatggaatccagtccgtttataaatcatctggttgatggaacgttgtcgcttatctgggcgaaaacacgtttattaagtgatgatccggcgaaaggggagggcaaggcaaaacggcattcactgttaccgcagcgcctgttcgatatcatgggctcacccagtgaacgcatcgatattatctcttcctattttgtaccgacacgtgcaggtgtggcgcaactcttacggatggtgagaaaaggggtaaagattgcgatcctaaccaattctcttgccgctaacgatgttgctgtcgtccatgcaggatacgcgcgctggcgcaaaaaattgctccgctatggggtggaattatatgaactcaagccgacgcgtgaacaaagtagtacgttacacgatcgcggcataaccggtaattcaggggccagcctgcatgctaaaacctttagtatcgatggtaaaacggtgtttatcggctctttcaatttcgatccgcgttcaacgttgctcaatactgaaatgggcttcgtgatagagagcgaaacgctggcacagttaattgataaacgctttattcagagccagtatgatgcggcctggcagctccgtctggacaggtggggacggatcaactgggttgatcgtcattcaaagaaagagattattctcaaaaaagaacccgccaccagtttctggaagcgggttatggtcaaactggcgtcgatattgcccgtggaatggttattgtaaacgcggcttaacgggctggtgctttatcgttctcacgcttaacaaccggtttaccagagaacaaaaacttcaataatgggatgcgtaaatgaatttcatacagaattatcgcaatccctactacgaatatcaggccacagagaaaaccaagccagttggaggtgatgtgtggtgtaatgtatgcgccgaaaaacagcgttaacgggtggtgaaccagatagataaacagcgatgcgttaacaaaataagtcacccgcgctgactggaagttaagcaaacggtggccaaaggagaagaccacattcaccatccacagaccgaggaccatagtgatcaccgactcggtttcatacatccaggcatcgccactgccatagcgctggttgagtaaataagcgacaaacgccaatgctgctgcaagggtacagccacgagacggcgtggtaaacaaggctttaagatgagggaaaatgaaagccagtgcgccgaggataaagaacggcaaataaaataacgtttgcatgacaataaaattgaacatgccgttactcagaatgggtggatacacaataaaaatcgttcttcttattaccgcataaccgatgccgaggcacaaaaaaatcaccgataattttaccatcgagaattttttattcgttttatcagaattttctaaattatttctgatgcgtttaaatatccatacgcacagcgtcgtcatgaccactaacaccagtaaaaaccacaggtgtgatattaattcccaggccaacgtattatatttgtcatacaatgacagcccaggccaactttccgctttccctttgacgtattgcagcataataaattgcggcaatgtcagtaaggggatggctgttaacatcgggatccctacacgttcgacacgtactttccaccattttttcaagggatagcgtaaaaaaagcatgtaggaaaagtacccggatataacgaaaaacacctgcatgcggaacgagtggatgaagtcattaaaaagggtcagccacaatgacggttcggcgctattcacatgccatgtatggctcgaatagattaaagaaatatgaaaagggatccctaacaacatcagccaggcgcggatagagtcgaggaaatattcacgttgcgcgggtactggattcatatatggttaactaatctcggatttttcgtcttatccctgtcgggttatgcctttaggcttgttgccatagcgacaccgacctgaccgcgccaggcgcaggcttcaaggtttttatgcatagcatcatcgctaccactaaccagaatggaagcgtctgtaagacggttgataaataaatttgctggcaaaccctacacgaagtcgatgcttctgtctttaggagaagcacggaaagtgaaaacggttgcaatcaggtgcttaatccatgagccagtgtgctgaacgataccgggattctgttgtcggaatggctggttatccattaaaatagatcggatcgatataagcacacaaagggggaagtgcttactaattatgaaacataaactacaaatgatgaaaatgcgttggttgagtgctgcagtaatgttaaccctgtatacatcttcaagctgggctttcagtattgatgatgtcgcaaagcaagctcaatccttagccgggaaaggctatgaggcgcccaaaagcaacttgccctccgttttccgcgatatgaaatacgcggactatcagcagatccagtttaatcatgacaaagcgtactggaacaatctgaagaccccattcaaactcgagttctaccatcagggtatgtacttcgataccccggtcaaaataaatgaagtgactgccaccgcagtcaaacgaatcaaatacagcccggattatttcactttcggcgatgttcagcatgacaaagacacggtaaaagaccttggttttgccggtttcaaagtgctttacccgatcaacagcaaagataaaaacgatgaaatcgtcagcatgctcggggccagctatttccgcgtgattggtgcaggtcaggtttatggcctttctgcacgcggcctggcaattgataccgccttgccatcgggtgaagaatttccacgcttcaaagagttctggatcgagcgtccaaaaccgactgataaacgtttaaccatttatgcattgcttgactcgccgcgcgcgacaggtgcttacaaattcgtagttatgccaggacgtgacacggttgtggatgtgcagtcgaaaatctatctgcgcgataaagtcggcaaactgggggttgcaccgttaaccagtatgttcctgtttgggccgaaccaaccgtcgcctgcaaataactatcgtccggagttgcacgactctaacggtctgtctatccatgctggtaatggcgaatggatctggcgtccgttgaataacccgaaacatttagcggtcagcagcttctcgatggaaaacccgcaaggcttcggtctattgcagcgtggtcgtgatttctcccgctttgaagatctcgatgatcgttacgatcttcgtccaagcgcatgggtgactccgaaaggggagtggggcaaaggcagcgttgagctggtggaaattccaaccaacgatgaaaccaacgataacatcgtcgcttactggacgccggatcagttgccggagccgggtaaagagatgaactttaaatacaccatcaccttcagccgtgatgaagacaaactgcatgcgccagataacgcatgggtgcaacaaacgcgtcgttcaacgggggatgtgaagcagtcgaacctgattcgccagcctgacggtactatcgcctttgtggtcgattttaccggcgctgagatgaaaaaactgccagaggataccccggtcacagcgcaaaccagcattggtgataatggtgagatagttgaaagcacggtgcgctataacccggttaccaaaggttggcgtctggtgatgcgtgtgaaagtgaaagatgccaagaaaaccactgaaatgcgtgctgcgctggtgaatgccgatcagacgttgagtgaaacctggagctaccagttacctgccaatgaataagacaactgagtacattgacgcaatgcccatcgccgcaagcgagaaagcggcattgccgaagactgatatccgcgccgttcatcaggcgctggatgccgaacaccgcacctgggcgcgggaggatgactccccgcaaggctcggtaaaggcgcgtctggaacaagcctggccagattcacttgctgatggacagttaatcaaagacgacgaagggcgcgatcagctaaaggcgatgccagaagcaaaacgctcctcgatgtttcccgacccgtggcgtaccaacccggtaggccgtttctgggatcgcctgcgtggacgcgatgtgacgccgcgctatctggctcgtttgaccaaagaagagcaggagagcgagcaaaagtggcgtactgtcggtaccatccgccgttacattctgttgatcctgacgctcgcgcaaactgttgtcgcgacctggtatatgaagaccattcttccttatcaggggtgggcgctgattaatcctatggatatggttggtcaggatgtgtgggtttcctttatgcagcttctgccttatatgctgcaaaccggtatcctgatcctctttgcggtactgttctgttgggtgtccgccggattctggacggcgttgatgggcttcctgcaactgcttattggtcgcgataaatacagtatatctgcgtcaacagttggcgatgaaccattaaacccggagcatcgcacggcgttgatcatgcctatctgtaacgaagacgtgaaccgtgtttttgctggcttgcgtgcaacgtgggaatcagtaaaagccaccgggaatgccaaacactttgatgtctacattctgagtgacagttataacccggatatctgcgtcgcagagcaaaaagcctggatggagcttatcgctgaagtcggtggcgaaggtcagattttctatcgccgccgccgccgtcgcgtgaagcgtaaaagcggtaatatcgatgacttctgccgtcgttggggcagccagtacagctacatggtggtgctggatgctgactcggtaatgaccggtgattgtttgtgcggcctggtgcgcctgatggaagccaacccgaacgccgggatcattcagtcgtcaccgaaagcgtccggcatggatacgctgtatgcgcgctgccagcagttcgcgacccgcgtgtatgggccactgtttacagccggtttgcacttctggcaacttggcgagtcgcactactgggggcataacgcgattatccgcgtgaaaccgtttatcgagcactgtgcactggctccgctgccgggcgaaggttcttttgccggttcaatcctgtcacatgacttcgtggaagcggcgttgatgcgccgtgcaggttggggggtctggattgcttacgatctcccgggttcttatgaagaattgccgcctaacttgcttgatgagctaaaacgtgaccgccgctggtgccacggtaacctgatgaacttccgtctgttcctggtgaagggtatgcacccggttcaccgtgcggtgttcctgacgggcgtgatgtcttatctctccgctccgctgtggtttatgttcctcgcgctctctactgcattgcaggtagtacatgcgttgaccgaaccgcaatacttcctgcaaccacggcagttgttcccggtatggccgcagtggcgtcctgagctggcgattgcactttttgcttcgaccatggtgctgttgttcctgccgaagctattgagcattttgcttatctggtgcaaaggaacgaaagaatacggcggcttctggcgcgttacattatcgttgctgctggaagtgctgttttccgtgctgctggctcccgtacgcatgttgttccatacggtcttcgtcgtcagcgcgttccttggctgggaagtggtgtggaattcaccgcagcgtgatgatgactccacttcctggggtgaagcgttcaaacgccacggctcacagctgctgttagggttagtgtgggcagttggtatggcgtggttggatctgcgttttctgttctggctggcaccgattgtcttctcgttgatcctgtcaccgtttgtttcggtgatttccagccgtgccaccgttggtctgcgaaccaaacgctggaaactgttcctgatcccggaagagtattcaccgccgcaggtgctggttgataccgatcggttccttgagatgaatcgtcaacgctcccttgatgatggttttatgcacgcggtgtttaacccgtcatttaacgctctggcaaccgcaatggcgaccgcgcgtcaccgcgccagcaaggtgctggaaatcgcccgtgaccgccacgttgaacaggcgctgaacgagacgccagagaagctgaatcgcgatcgtcgcctggtgctgctaagcgatccggtgacgatggcccgtctgcatttccgcgtctggaattccccggagagatattcctcatgggtgagttattacgaagggataaagctcaatccactggcattacgtaaaccggatgcggcttcgcaataaaaacgtagttgcctgatgcgctacgcttatcaggcctacatcgttcctgcaatttattgattttgcaagattttgtaggtcgggtaaagcgttcacgccgcatccggcaaaaacaacgagccaataaaaataccggcgttatgccggtattttttacggaagaggtatcaaatgcgtttaattgtgatgagcataatggtgaccttgctgagtggctgtggcagcatcattagtcgcactttaccggggcaggggcatggcaaccaatattatcccggtgtgcaatgggacgtgcgtgactccgcctggcgttacgtcacgatccttgatctgccattctccctggttttcgatactttactgctgccgatcgacatacatcatggcccgtatgagtgattaacgttcatcccactcatcagctgcagtgcgtccttcctcggtatccagcggtggctcaagctgaaattccccctcgtcccattcatgtaatgtattctcatcttgccactcctggcggatctcaatctcatcatagtcgccgtcaaagacactttgcgcagcttcaccgctaagcatgggtaaacattcaccttcttccccttcgtcggcaaaaaactcaacttgccacatgatgtcgccgtcctgcaaaacgtatttttgggcattgaactgttgcacattcgcgttttcggcgtcgatgccggggttgtctgcaagaaattcttcgcgtgcagcgtcaatggcttcttcaagcgttgcgtacatggtcatcacgattctccctttgagttgatgaggtttcagggaaaaggatagctgattctccgcttttgcaagtatgaaaggcgaaaaatcagttcgatatctgggggattcgacgacgacgtagactgttccatgaatagactgcgttgaataacactacgccagcggtgacgagaaataccgccctgaaaccgtagttcgctgaaatcgctgctcccatcaatggtccggtaacgttgccaatatcacgaaacgattggttatagctgaagatacgcccggcgatctggttgctcgagttataaactaatagtgtctgtacggcggggagtagtgcaccatcggcggcaccgagcaaaaaacgtaaaatcccaagttgtaatggcgtctgaacgtaagacattgggatcaacagcagtacagaaaagatcagcgccgtaatcaggatcttttcggggccgattcgatcgccaagtttgccgagtcgtggtgcacttagcagagccgccacgcctggcaccgaggcgatcatgccactgataaaggcgacgttactgacgttacccgccagttcgcggacatacagcgtcagaatgggggcaattgagcccgtcgccacctggatgattaacgtggtgacaaacaggctgagtaccagtttcgggtttttaagtgatgtcaccacttcccgcatatgcagcatctcttttttgctgaccggctggaatttttctctgatgcaaaacagggtgacgaaaaagcagagtatgagcacactggcggtaataaagaataccggacgtaagccgtagctatcggcgagcaaaccgccagccattgggccgagcaacgcgccgctaacgccgcctgtggagagcgtacccagcgcccagccgcttttattacgcggtacttgtgtggcgataagagcattagcgttggggacaaatccgccaagtaaaccaagaagcgcccgcaggatcaaaaactgccagatattttgtgccagtcccatcaacaccatcacgatgcccatgccgagagcagagcgtaatagcatgatttttcggcctttacggtcggcgagtccaccccaaaacggtgaggcgatggccgaaaataaaaatgtaatgctgaagacaataccggaccacatattcagggcggagtggccggtaacgccaagctgctcaacgtagaggggtaagaagggcattaccaggctgaaggcggcaccggtaagaaaacagcctagccaggcgacgatcaggtttcgtttccagtttataggggtgtcattttcacagggtgacatagcaatccgctgttggtgcgccaggcgcggtgaacataagaagaaaagataagcacactaattatgcgcccgacttccagggggcgcaatccagagagcttttatcgctaaatcagggggattttctgtggtaatgccggatgccattctgaagcatccagcatggaagatttaatagcgtgaaggaacgccttccgggcgtgttttaaagcgacggtgtaaccacatatactgctctggtgccatcatgatgcatttttcgaccactttgttcatccacgcggcggtagtttcggcatcatccagcggcggagaacactctggcggcagtataatcaactgataccctttgccatctggcttacggcgtggaacgaagggcaccagacatgcgccggacatccgtgccagcatccaggttccggtcgtggtcgcagcctgctcaacggcaaacaacgggacgaaaacgcttgagcgcgggccgtaatcatgatccggtgcgtaccagaccacttcgccttttttcagggctttaatcatgccttttaaatctttgcggtcgagcatcgatttatttgagcgcaaacggccccaggtttgtagccagtcaatcagtggattatcgttcgggcggtaaacgccaatccccggttcctgcataccaaactgccgcgcacccagctccagtgtcagaaaatggatgccaactaacaggatgccgcgtttttgcgcctgcacgtcacgaatgtgttccatgccgatcacttccgtccagcgggcgattcggcggtccggccagaaccacgccatgccggtttccatcaggcccatgccaacggattcgaaattcttcaccaccattttacggcgttcttgttcgctcatttccgggaagcacagttccaggttgcgatgcacaatttttgcgcgtcgtttcataaaacgtaacgccagttttcctaatccacaaccgaggcggtagataaccgggtagggcaattgcacgaccaaccaaagtacgccaatacccaaccaggttaaccaataacgcggatgaagcagtgcggtggagaacttgggtagattcgtcatatcaatcctgtttttcaacctatacgggcaattgtatgtattgtcgcattttttcgtccgcaaccaaaatttgtgactgaagactgggcgaaattgccgcgcttgtaaataacaaataatttttaatgctaaaatgtagcgtaaaatgtgtggatgttaattatcgataattgctatatcatgccgcggatttttactttcccatctcgcaggaaccgtacaccatgccagtgttacacaaccgcatttccaacgacgcgttaaaagccaaaatgttggctgagagcgaaccgcgaaccaccatttcgttttataagtatttccacattgccgatcctaaggtgacccgtgacgctttatatcaactgtttaccgcgctgaatgtttttgggcgagtgtatctggcgcatgagggcattaacgcgcaaatcagcgtacctgcgagcaatgttgaaacatttcgcgcgcagctctatgccttcgacccggctttagagggtttacgcctgaatatcgcgttggatgatgacgggaaatccttctgggtactgcgtatgaaggtacgcgatcgcattgttgccgacggtattgacgatcctcactttgatgccagcaatgttggtgagtatctgcaagcagcggaagtgaacgccatgcttgacgatcccgatgcattgtttatcgacatgcgtaaccactatgagtatgaagtggggcactttgaaaacgcgctggaaataccggcagataccttccgtgagcagctgccaaaagcagttgagatgatgcaggcacataaagataaaaaaatcgtcatgtactgcaccggcggcattcgttgtgaaaaggccagtgcctggatgaaacataacggattcaacaaagtctggcatatcgagggcggaattattgaatacgcccgtaaggcgcgcgatcagggcttgccggtgcgttttattggcaaaaattttgtttttgacgagcggatgggcgaacgtatatctgatgagattatcgcgcactgccaccagtgcggtgcgccgtgcgacagccataccaactgtaaaaatgatggctgccatctgctgtttattcagtgtccagtatgtgcggaaaaatacaaaggttgttgtagtgagatttgctgcgaagaaagcgcgttaccgccagatgaacagcgacgtcgtcgggcaggacgtgaaaatggcaataagatctttaataagtctcgtggacgtctgaatacaacactgggcattcctgatccaacagaataaatatcattgccggatgcgtgccatccggcaacatttcactcttacttctgctgtacgccttccactgaaataatcagatccacttcctgagacgctggacctaaatctgtcttgatattgaagtctttgagcttaattttgccttcggcctcaaagcctgcacgtttaccgccccacgggtcgtcaccctgaccaattaatttcgcttccagtgtgacgggcttggttacaccattcagcgtcagatcgccggtaatatccagttcgtcaccgtctttcttcacgctggtggaggtgaatgttgcctgtggatattttgcggtattgaggaaatccgcactgcgaagatgtttatcgcgttcggtgtgattagtatcgacgctggtggtgttaattgtcacattcactttatcggcagctggatttttttcatcaaaggtaaaagtaccgtcgaaatctttaaaggtgccatataaccagctatagccaagatgctggatgcggaagttaacaaaggcgtgctgaccttctttgtcaattttgtaatcggcggcaaccgctgaaccggcagagaacatcaaggaagcgaaggttaaaccaagcaggctttttttcattttttatactccatagtcagatgacgactttcccagcatgcgcttcagagtgtcgtctttatcgatgaaatgatgcttcagggccataaatccgtgcataacggacagtactacaacgctccacgcgagccaaaaatgcagggcaccggcaaagtcagcctgtgcgccagcgtcggagaggatcgcggggacgtcaaaccagccaaaaacgctgatcggtttaccatcggcagttgagatcagatagccgctgatgccgatggcgaacagcaataggtacaatgcgagatgtccagcttttgctgcaagacgagtcatgggcgaataactcggcagcggacccggcggtggagatatgacacgccacagaacgcgaataaccagccccatcattaacaaaatgccgatgcttttatgcagttccggtgcctggtgataccagccatcgtaataactgagcgtgaccatccacagacctaaagcaaacatgccatagacaataattgcgcttagccaatgtaaggccgcagatataacaccatagcgttcaggggtatttgtgaatgacataagtgcatccaaaacgaatttgcgagagaaagaaaatggcgtgtcggagaatgaattgcaacacaaaaataacaaattgaatgatatttatttttatttcaataattttgaattaataatgaaagaatcttcataagtttagtgggttcagcatctggaaggtctagtgagtgctgtagaggcaggaagaatctcattcaatttttcacgctaaatgaaagggagattaaatatttgtcagtttatgtcagtgcggaaaaactaaaaataaaacacgtagattaggtccataattgctaatagtccccagagaaaaagataaagcatcagatgctcgcgaatattaatgagatagttcaccaaccgacgcattaaatacccctgtaaaaacggcctcattctggaggccgtaatgatgattattggaagcgggaaagcctgaatggcgtcaaatcaaaatcgctttttttgtcttgcgcaaaatcggcagctatttcccctaaaactgacgcaaatttaaaaccgtgcccactcaggccggtaataagcagggtattatcgtgggcgggtaaggtatcgataataaaatcctcgtcaggcgaattatcataggtgcaggcagcgccgtacaggcagcagccgatacccggcaacacattgcgcaagaacgggaaggcttccgaaccatcgctgaccacttccgcaaacggaacacgttcatccgctgaatggataacctggcctccgttatgtttgccaatcttcaacgcgtcgttttctgccggaaaaccataatattgatcgccattgggcagttcaccggtaaacgccgggaatttattcttcacgctatagcgaccatcggcctgataccaggcaaatactttgcgtacgggctggacaggcagctccgggagtaggtcttttacccatgttcccgcgcagacaatcgcttttttcgcctgatactcaccgtcagccgtttcaatagttacgccatcatcgtcatgacgaattgcggtgaccgggcagttgaacagctgcgcacagcccgcttccttcgccagttggatccaggttttaatcgccagttcgctgcgcaaaaaaccggaatcagtttcaaataaaccgatgtagttgtccgggacgcgtatttctggccagcgggccataatcccttgcgcgtcgagcttttcaacgttgagttgccactgttcggcgctgtgggcgacgttggcgagaaatgcggagtcagccggaccgaggttaatgacaccagagcgtacaaaaatgggatcatcttcgttgtggcgggaaagttcatcccacagcatttgcgcgcggaggaccagcgggacatacttttcgccttcaccataagcatggcgaattaatcgcgtatcgccgtggtggctgccgtgttgatgcggtggcatatgggcgtcggtcattagcacgtttaaaccggcgcgggttgcataatacccggcggcagcgcctacggaaccgctgccaataatgatgagatcgtatttcatttttttctctctgctctcatggtttaagcagagtaattaactgaatgcagatatacaacccagaaatggtaaaggcaccggtgaggtgccttttgggtggatggtcatgtcatgttaatgacgccgatactcgtttacctggaaatcaccggattcaattttggcgattcctgcttctaatatcgaaataaattgtctggcaacatcagtggttaaccagagcgtctgaccaacttcagtcccttcctgctcggacttatttggggtctggtagtgcaaacgcaacatcagcgcatcatagctatcaacggtgctgatgtcccaccctacgagcggatgagtctgaatgacttcattatttttttccatcatggccccctaattcgtgttactagacaacgttattcgaggttcaatgcgtttttatctgaagcaacttcagtataccaataagtaagggtattcaccgaatttttaaaggggggagcagataaatttctgcttttaagatttatatgaacaataaaacagcatgtcattcatatttttttagcatattgtgcaattattttgaggaagtgtagaaattttgtactcacaattcgcaagtaaaataaaaaagccggggcgacccggcaaaaacaaaaatcactgcatattattcgctgacaaaccagtcatcggcgctttcccacgtttcctggagaatttcgctaatgcgctgtttatcttcttttgtcgcgccaataaccgataaattatttgctgcggcataacgtaccgatacgtggccttcattatcaggaaacgcatactgaatacggcgggaaagttcgccagccagggcgtcaatagccccagctggcaatggagaagttttcgctatggtgacttcaattcgcataatagccccctgttgaatatactggttatttatacaggtaaaataacctaatgacaacaggaagctacgatttttattgtttaacggaccagcgtaccgtttctccggcgaggaatggcaccagcgtgtcatcagtcagtgcgatgctttcagcaacctgttgctcttcacgtaccagttcgatgaatgtgtcgttgaccggcaagccatagaactgcgggccgtttacagaacagaatgcttcaaagtgctgcaaagcattcatctcttcaaagacggtagcgtaactgcccagcgcggttggggcgttgaaacagcccgcgcagccgcagctgctctctttgcgatgacgtgcatgtggcgcagaatccgttccgaggaatacacgattaaaaccgctggcgaccagttcacgcaatgcctgttggtggatattgcgtttgaggatgggtagacaatacaggtgcggacgcacgccaccaaccagcatatggttgcggttaaacatcagatgctgcggagtgatggtggcagccagccgttcatttccgtcacggacatagtcggcagcgtctttggtggtgatgtgctcaaaaacgactttcagtgcagtcaggcgctggcgcagcggttccatcacgctttctataaagcgcgcttcacgatcaaaaatgtcgatatctgcatgtgttacttcaccatgcaccagtagcggcataccgattttttccatgcgctcaagtaccggcatgattgcgtcaactgacgtaacgccgtggctggagttagtggttgcgtttgccggataaagttttgcagcggtgaacacgccttcgttaaatccgcgctccagctcattaggatccagcgaatctgttaaataacaggtcatcagcggggtgaaatcgtgcccggcaggtacggcgtcaagaatgcgctggcgatacgccacggcagcctcaacggtggtcacgggcggagccagattgggcattacgatagcccgtccataaatttcgctggtatacggcacgacagtttttaacatgtcgccatcgcggaggtgaaggtgccagtcgtctgggcagcggatctttaatacctgggatggtgcagtcattaatctctatgctccggctgaagggatgtttttgccggacacaaaggataagcggaaacgttttcctttgcacgaaaaataaagggcgcgaatgcgccctcgtgattaatcagtaaacggaatgacaatttcgcctggcttcacttcaatgcctttcgccagtttcttcgccattgcttcgccctggctgccatcttcgcgcaggacgtaagcaggttgctggttaaagtaattgcgtaatgcctggtttaaatagggaagcaacgtttgcatcaccgtttgcatttttcccggttgtaccgtcgcatcgaccacttccatctctttcaggaagatcgcgcctttttctttatcaaacacgggcagcgctttcagcttcagtttcatggtcgctttctggctaccgaacagggagttcatgtccagattggcgtctccggttagggtaaccttattcggctcttcgcgaccaatttggctggtcaggtttgtcagaacaatatgggcgtcagccacgccgggtaaaccgatatcttttgagaaattattatgtttcgcaagcgactggttaatttcttgttcggtgatggtgtattgggtgagttgattacagccaacgagcaggccactgacgatcaatgcagcggcaaataaaaacttgttcatggtagtcctcgacatgaaatctgcgtcaatatcctgacacaacgcagcatgtgtcaccagcgataaacgcgccagcagaaaaaactgaaaacggcggcaacccgcgaatacaggctgccgcggcgggtcaggattaaatcgccattgatgataacaaattgatttgtgtctgtttcgccatattatcgcggtaatcagcaacgcggcttggccagttgattccggctactagcgtcagattacgcaggagcggaaatagctgaatatcatcttccgaaagttcgccattcacggcgttcggtttgacgatcagtttgtccagcgcacgtaaatcatcgctgatattcttaatcagaccgtcagagtgggccagcaggtcggcaaaattacccgcgctggcctctttcttgtcgacgaaatatttgcgcgcggcaggagtagaaaactcatcaaatgccgatttggcaaaacgcggcaacagcagtttgttggcgtagccattgaccttgcgcagccactcttcaatggcaggggaacgtttgccggtcagtaacggtttgccgtcgagtttatcgacatagtgaacgatgtccatgctttctggcatatagcggctgtcatctttttgcagaatgggaacctgtttttgaccgaccatccgggtgggtgtttctgcgtcgtcgttgagcagaacatgtaattcgacggggatatttttcaggccgaaaatcatgcgggctttgaggcagtaagggcagtgatcgtaaatgtatagcttcacgtgactcctccatttggctatcagttcactttcagtatggaggagtcaggggggagtatcaaatcaggcgtcgcgttcaagcaaacgacgcgcggcgcgtttctggctaaactgccaacccagcgcaaggaaagtgaagatgccaataatgcccagcatcatccacggaagctctggctggtgcgccgatttgcccagatcaaacagccagccgccaccgatataaccaatagcgccgccaatcgccagacccagacggctaaaccccatatagctgccgcgagctcttgcgtctgccagcgaagcacttaaggtttcacgcgcaggctcggcaatgatcgacccgatataaaacagacaaatcagggtgaaaagttgttgcaggccgctgaccatgcccactggcatcatgcttaatgacattatcaacagcccagccattaaccggtgttccagacgaaaatgcttttcactccagcgggcgatagggtagagcaacgttaacgacagacacgcttcaatggcatacatccatttaacggcagagggcgcgccagccacgtcgttgaccataattggcagcatcagcatcacttgtacagccagcatgtagtaacccgccagcgtcaggacataggtgacaaaacgcttgtcgcgcatcacgcgggtcatgccttcgcgaacgggcgtgcgcacggtggagagtttccatgccggtaacaaccacgcattgaacgctgcacacagcacaaacaaaactgcccctgtggcgcagaccaggcgaaagtcgtattgcaacagccagctccccaacaatgcgccaatgaccgcaccggcactgtcctgcatcatcaacagcgagaaaaaacgaccacgctgctgtggacggattaatttcaccaccagcgccgaacgcggaggatcaaacaacgtgccgccgagtcccgaaagcaggcatgaaaaccacagtagccacggttcgtgggcgatacccattgtggcgaatccggcggcacgcatcagcataccggtgacaatcatcggtttggcaccaaagcggtcggcaattgcgccgccgaaaatacccagaccttgctgaataaactggcgtagaccgagggcaataccgaccatgacggcggcccagcccatttgatcaacgaagcggatagagatcagcgggaagacaacaaagaaccccagcacgaccagcatattatcgatgagcaggaaatatttacccaggttcctcgcctgcgacacgcgggacatttcccctcccgggaaataaaagatgagcactttctattctgcattgccgctaagacttttcccatcacttcggggacaatatttttttatcaaaacgtcgctttgatagagagtttttatcaaatatgtgaataatgcagaaaatggcattctggacttttcacagggtctggttgcgcaggtatagtaatacttacagcgtattaaagacgttacgggaaggagtaggtatagaatgtttggctatcgcagtaacgtgccaaaagtgcgcttaaccacagaccgactggtcgtgcgtctggtgcatgatcgtgatgcctggcgtctggcggattattacgcagagaatcgccatttcctcaagccctgggagccagtgcgcgacgaaagccactgttatccatcaggctggcaggccaggctagggatgattaacgaatttcataaacaaggttcagctttctactttggcttattcgacccggacgaaaaagagattattggcgttgccaatttttccaatgttgttcgcggctcttttcatgcctgctatctcggttattcgattgggcaaaaatggcagggcaaaggactcatgtttgaagctctgagcgcagccattcgttatatgcagcgcacccaacatattcatcgcattatggctaattatatgccgcacaataaacgcagcggtgatttactggcgcgactgggttttgaaaaagaaggctatgcgaaagactatctgttgattgatggacaatggcgcgatcacgtactgacggcattaactaccccagactggacgcccggccgctaaggagaatctcatgaaatatcaacttactgccctggaagctcgcgtgattggttgcttgctggaaaaacaggtgaccacgccggagcaatacccgctctcagtcaatggtgtagtcacggcctgtaatcagaaaacgaaccgtgaaccggtcatgaatctgagtgaatccgaggtgcaggagcaactggataatctggtcaaacgccattatctgcgcacggtgagtggctttggtaatcgggtcaccaaatatgaacaacgtttttgtaattcagaatttggcgatctgaaactgagcgccgcagaagtggcgttaatcaccacgttgttattgcgtggtgcccagacgccgggtgaactgcgcagccgcgccgcgcgaatgtatgaattcagcgatatggcggaagtggagtcgacgctggaacaactggcaaatcgcgaagatggtccttttgtggtgcgtctggcccgcgaaccgggtaaacgtgaaagccgctacatgcatcttttcagtggtgaggttgaagatcagccggcggtgatggatatgtcgaacgcggttgacggtgatttacaggcacgcgtcgaagccctggaaatcgaagtggcagaactgaaacagcgtcttgattcgttgctggcccatctgggagattaaagtgaaaaaattacgtatcggcgtagtggggttaggcggcatcgcgcaaaaagcgtggttaccggtgctggcggcagcgtctgactggacgttacaaggtgcgtggtcgcctacgcgcgccaaagccttgccaatttgtgacagctggcgcattccttatgctgattcgttatccagccttgccgccagttgcgatgcggtttttgtgcattccagcaccgccagccactttgacgtggtcagtacgttactcaatgcgggggtacatgtctgtgtcgataaaccgctggcagaaaatctgcgcgatgctgaacggctggtggaactggcggcgcggaaaaaactaacgttgatggtcggttttaaccgtcgtttcgcaccactctacggtgagttaaaaacgcaactcgccaccgcagcctcgctaagaatggataaacatcgtagcaatagcgtcgggccacacgatctttatttcacgttgctggatgattatctgcatgtggtggataccgcgctgtggttgtcgggcggcaaagcctctctggatggcggtacgctactgactaacgacgctggcgaaatgctgtttgccgagcaccatttttcggccggtcctttgcagatcaccacctgtatgcatcgccgtgccggaagccagcgtgaaaccgtgcaggccgtgactgacggtgcgctcatcgacattacggatatgcgcgaatggcgtgaggagcgtgggcagggtgtagtgaataaaccgattcctggttggcagagtacgcttgagcaacgtggatttgtcggctgtgcgcggcacttcattgaatgcgtgcaaaatcagacagttccgcaaaccgccggcgaacaggcagtgctggcgcaacgtatcgttgacaagatctggcgcgatgcgatgagtgaataaaccctgtaacatctggcggtagcaattcaccataatccaggtagactattcgcctctttcagcgcctgccttgcaggcgttttgcccgtgggtctggattagaacaccgatgaatttattaaaatcgctggccgccgtcagctcgatgaccatgttttcgcgtgtgcttggcttcgcacgtgacgcaattgtcgccagaatctttggcgcagggatggcaaccgacgcctttttcgtcgcttttaaacttcctaacttgttacgccgtatctttgccgaaggggcattttcccaggcatttgtaccgattctggcggaatataaaagtaagcagggtgaagacgccacgcgggtctttgtctcttatgtttctggcctgctgacacttgcgctggcggttgtgacggtcgctggcatgctcgccgcaccgtgggtgatcatggtgaccgcgccaggcttcgctgacacagctgacaaatttgccctgaccagccagctactaaagattacctttccctatatcttgctgatctccctggcgtcgctggtgggagcgattctgaatacgtggaaccgcttctcgattccggcgtttgctccaacactgcttaacatcagcatgattggtttcgcgctgtttgccgcaccgtactttaacccaccggtgctggcgctggcgtgggctgttacggtcggcggcatcctgcagctggtgtatcagctacctcatctgaagaagatcggcatgctggttttgccacgcattaacttccacgatgccggagcaatgcgtgtggtgaaacagatgggaccggcaatccttggcgtctctgtgagccagatctccttaatcatcaacaccatttttgcctcgtttcttgcttccggttcggtgtcgtggatgtattacgccgaccgcttaatggagtttccgtccggtgtgctgggcgtggcgcttggcaccattttgctaccgtcgctgtcgaaaagttttgccagtggcaatcatgatgaatacaaccgtttgatggactgggggctgcgtctttgtttcctgttggcgctgccgagtgcggttgcgttgggcattctttccggtccgttaaccgtttcgctgttccagtacggtaaatttaccgcctttgatgcgctgatgacccagcgggcgttaattgcctactcggtgggtttgattggcctgattgtagtgaaagtgttggctcctggcttttattcccgccaggacattaaaacgccagtgaaaattgccatcgttacgctgattttaacgcaattgatgaacctggcgtttattggtccgttgaaacatgccgggctgtcactttctattggtctggcggcgtgtctgaatgcttcgctgctttactggcagttgcgtaagcagaaaatctttaccccgcaacccggctggatggcgtttctgttgcgtctggtggtggcggtactggtgatgtctggcgtgcttttaggtatgttacatatcatgccggagtggtcattgggtaccatgccctggcgtttactgcgtttaatggcggtcgtgctggcggggattgccgcgtacttcgctgcactggcggtactgggcttcaaagttaaagaatttgcccgccggacggtgtaacgatacattccggcctgcagtgcaggccggagttaatcttcagatcgaaatctttttactgccgcgatgggttgttgaggtctgaccgttcgccccatacagcgtcggttcctgatgcggtttcaacatttccagcgcctgttgattgcgttcaatctgtccttccagtaaccagccgttatgttgattcatttggcgtagttgctgcgttttcacagtaatttcctgccagcgttgactaatatcaacgctatttgctgaattgggttctttcctgcgtaactgttcgaggtaatccagcgtcgccagcagagagcttttttgttctgtaatccattgcaactggctgccgttgatctgccccatagagagatgttgctgctcttgatccattaccgttttgagatcgttaagcacagcggacatctggtcgaggatctctgcaagacgcgtcatacgatcagttactctgcaagtcttgctgcgcttcgttgatcagcgcatcggcaattttgccggtgtccatttttagttcaccgttacgaatcgccagctttaacgcttcgacacgttcaagattgatatcactgctgccgggttgcatcagttttgcttgcgcgtcgcttaacgtcacactggtgctggtggaggcggttgtttttgccgcccgggtgtttgttaccggcgcgtcagtggtttcgcgcggttgaacggtgcttacgggcttcagaggcgaagtgcgatcaatactcatggtttattcctcattgagggcgcttttatcatgtgttgcttatttatcggcaagggatgggttatctttaacagcttacaggtttataagaatattcccatctgcatcaacaacgccgctgaccacctgtcccgataccatgcgcacccgcgcattctgtgcgacggcagcattgttcagcgcctgaccttctgcgttggcgctaaccccataaccgctggcgatcacgttgacgcgttgtcccgcttttacccgccatgcctggcgaaactgggttaactggataggttgatcgggtgatagatcgcgcaggctaacggcatcaacaagttgattgatatccagcaccgtacgcggtggcagggtgtccagccgtccgcgtttcagtttgacattgccagcttccagcttttctccccgcacaatgggcattgcggcaaccacataatttcctgtggcctgcacattaacctgtaaatatcgtttgtcgttaccgcagcgtgccaacacattcacattgccccacaggcgggaattattgctcatcgaaagcaatggctgctcgcacggcggcagtagattgggcgctgtacgaatagaaacacgaacctcatcacttacccccgcgagctgggcgctaaaaaaggtgtgcaattgcgatgtgagattgctcgccgcacttaacggactgaacagtatcgcgatgatcgccacgcgacgttttattgccagcattttcgccccccagccatttctacaacgtgaattgtacctgtccgcaatgaccatcaacggcataaatagcgacccattttgcgtttattccgccgataacgcgcgcgtaaaggcatttaagctgatggcagaattttgatacctgcggaggagatatgctcgataagctcgacgccgccttacgttttcaacaagaggcgctcaatctgcgcgcccagcgtcaggaagtgctggcagcaaacatcgccaatgccgatacccctggttatcaggctcgcgatatcgattttgccagtgaacttaaaaaagtcatgcaacgtggacgggatgcaacaagtgtggttgcactgacgatgacctcaacgcaacacattccggcgcaggcgctgacgcctcctaccgcagaactgcaataccgtattccggaccagccttcgcttgacggtaataccgtcgatatggatcgcgaacgcacccagtttgccgataacagcctgcaataccagatgagccttagcgcgttgagcgggcagatcaaaggcatgatgaacgttttacagagcggaaattaacggatggcactgctgaatatttttgatatcgccgggtcggcgttaactgcccagtcccagcgcctgaacgtggcggccagtaatctggcgaatgctgatagcgtgaccggtcccgatggacagccatatcgggcaaaacaggtggtattccaggttaacgctgcgccaggtgctgcgacaggcggcgtaaaggttgccgatgttatagaaagtcaggctccggacaaactggtttatgaaccgggtaatccgctggcggatgcaaagggctacgtgaaaatgccaaacgttgatgtcgtcggggagatggttaacaccatgtcggcgtcacgcagttatcaggccaatgttgaagtgctcaacacggtgaaaagcatgatgctgaaaacccttacgctcggtcaataaaggagaaagctatgtctattgcggtaaccaccaccgatccgacgaataccggcgtcagtaccaccagcagtagttcgctcacgggcagcaacgccgcagatttacaaagcagttttctgactttgttggtggcgcagctgaaaaaccaggacccgaccaatccaatggaaaacaacgagctgacgtcgcaattggcacaaatcagcacggtcagtgggattgaaaaactcaataccacgctcggatctatttccggacagattgataacagccagtcgttacaggccagtaacctgattggtcacggcgtgatgatccccggtaccactgttcttgcgggaaccggcagtgaagaaggggctgtgaccacgaccacgccgtttggtgttgagttgcaacaggcagcagacaaagtgacggccaccatcaccgataaaaacggcgcggtcgtccgtaccattgatatcggtgaactgactgccggagtccacagtttcacctgggacggtacgttgactgacggcagcactgcgacgaacggttcttacaatgtagcgattagcgccagtaacggtggtacacaactggttgcccaaccgctgcagtttgctctggtgcagggggtgatccgcggcaacaacggtaatacgctggatctcggcacttacggcaccactatcctcgacgaagtacggcagataatttaagccttcacatttcaggagtcagtcatggccttttctcaagcggttagcggattaaacgctgccgccaccaacctcgatgttattggcaacaatatcgccaactccgccacctacggctttaaatcaggcacggcctcttttgccgatatgtttgccggttcgaaagtgggactgggggtaaaagttgctggtatcactcaggactttaccgatggcacgaccaccaacaccgggcgtggtctggacgttgctatcagccagaacggttttttccgtctggtagacagcaacggttcggtattctacagccgtaacggacaatttaagctggatgaaaaccgtaacctggtgaatatgcaaggtttacagctgacggggtacccggcaaccggtacgccgccgactattcagcaaggggcgaatccgaccaatatttcgatcccgaataccctgatggcagcgaaaactaccaccacggcgtcgatgcagatcaacctgaattccagtgattcgcttccctctgttaacgcatttgatgccagcaatgcggatagctataacaaaaaaggttcggtgactgttttcgatagtcagggtaatgctcatgatatgagcgtgtactttgtgaagaccggggataataagtggcaggtctacacccaggatagcagtgatccaacaggtacagctgagcctgcaatgacgctggtgtttaatgccaatggcgttctgacctcagatccaacaaaggatattaccaccggcgcaattaacggcgcagatcccgccacgtttagcctgagcttcctcaactccatgcagcaaaataccggcgctaacaacattgtggcaaccacccagaacggctacaaaccgggcgatctggtgagttatcaaatcaatgatgacggtacggttgtcggcaactattccaacgaacaaacccaactgctggggcagattgtactggcgaactttgccaacaacgaaggtctggcatccgaaggcgacaacgtctggtccgctacgcaatcttctggcgtggcgctgttggggacagccgggacgggcaactttggcacactgaccaacggtgcgctggaagcgtccaacgtcgatctcagtaaagaactggtcaatatgatcgttgcccagcgtaactatcagtctaacgcccagaccatcaaaacccaggaccagatcctcaacacgctggttaacttacgctaatcgctgacgggatagctcaatggatcacgcaatttataccgcgatgggagcagccagccagacgctgaatcaacaggcggtaaccgccagtaatctggccaatgcctctacgcccggttttcgcgcgcagttaaacgccttgcgcgcagtgccggtggaagggctttcactgcccacgcgcacgctggtaacggcgtcaacaccgggtgcagacatgacacccggcaagatggattacacctcgcgcccgctggacgttgcgttgcagcaggatggttggctggccgtgcagaccgctgacggcagtgaagggtatacgcgtaatggcagcattcaggttgatcccaccgggcaactgacaattcagggacatccggtggtaggcgaggcggggccaattgctgtgccggaaggggcggaaatcactattgctgccgatggcacaatctcggcgctgaatccgggcgatccggcaaatacggttgcgccagtggggcgtctgaagctggtgaaagccacgggcagcgaagtccagcgcggtgacgatggcatttttcgtttaagcgcagaaagccaggctacgcgtgggccggtactgcaggcagatccaaccttgcgtgtgatgtcgggggttctggaaggcagtaacgtcaatgccgttgcggcaatgagcgacatgattgccagcgcacggcgttttgaaatgcagatgaaggtgatcagcagcgtcgatgataacgcaggccgtgccaaccaactgctgtcgatgagttaattgaaaggatacatgacaagtataagttgccctatgcgcaagtttatcgggtctatgggggcaatcgcaatttatcgattttgcgagctcttgtaggccggataaggcgtttacgccgcatccggcaagaagacatatgcactttgtcactaatccactacaggacattttatgatcagttcattatggatcgccaaaacgggccttgacgcccagcaaaccaatatggacgtcattgccaacaacctggcaaacgttagtaccaacggttttaagcgtcagcgcgcggtgtttgaagatctgctgtatcaaaccattcgccagccgggggcacagtcttccgaacaaaccaccttaccctccggattacaaatcggtacgggggtacgcccggtcgccacggaacgtttacacagccagggcaacctgtcgcaaaccaataacagtaaagacgtcgcgattaaagggcagggctttttccaggtgatgttgccagatggctcatcagcctatacccgtgacggctctttccaggtggatcagaacgggcagctggtgacggccggtggttttcaggtgcagccagcgatcaccattccggcgaatgcgttaagtatcaccatcggtcgtgatggcgtggtcagcgtaacccaacaaggccaggcagctccggttcaggttgggcagctcaatctcaccacctttatgaatgacaccggactggagagcattggcgaaaacctctacaccgaaacgcaatcctccggtgcaccgaacgaaagcacgccgggcctgaacggcgcgggactgctgtatcaagggtatgttgaaacgtctaacgtcaacgtggcggaagaactggtcaatatgattcaggtgcaacgcgcttacgaaatcaacagtaaagcggtgtccaccaccgatcagatgctgcaaaaactgacgcaactctaaggcttaaccggtggcaggttcaccggtttactgatttttgaagatgatagccatgcaaaaaaacgctgcgcatacttatgccatttccagcttgttggtgctttcactaaccggctgcgcctggataccctccacgccgctggtacaaggggcgaccagtgcacaaccggttcccggtccgacgcccgtcgccaacgggtctattttccagtctgctcagccgattaactatggctatcaaccgctgtttgaagatcgtcgaccacgcaatattggcgatacgctgaccatcgtgttgcaggagaacgtcagcgccagcaaaagctcctctgcgaatgccagccgtgacggtaaaactaattttggctttgatactgtgccgcgctatttgcagggggtgtttggtaacgctcgtgccgatgtcgaagcctccggtggtaacacgttcaacggaaaaggcggggccaatgccagcaatacctttagcggtacgttgacggtgacggttgaccaggtactggtcaacggcaacctgcatgtggtgggtgaaaaacagatcgccattaatcagggtaccgaatttattcgcttctctggcgtggttaatccacgcactatcagcggcagcaataccgtaccatctactcaggtggcggatgcgcgcattgaatacgtaggcaatggctacattaacgaagcgcaaaatatgggctggttgcaacgtttcttccttaatctgtcgccaatgtaagtgaggctgtggtgattaaatttctctctgcattaattcttctactggttacgacggcggttcaggctgagcgtattcgcgatctcaccagtgttcagggggtaaggcaaaactcactgattggctatggcctggtggtggggctggatggaaccggtgaccagacaacccagacgccgtttaccacacaaacgcttaataacatgctctcacagctgggaattaccgttccgacgggcaccaatatgcagctaaaaaacgtcgctgcggtaatggtgacggcgtcacttccgccgtttggacgccaggggcaaaccatcgatgtggtggtttcttccatgggtaatgccaaaagcttgcgtggcggtacgttgttgatgacaccgcttaagggcgttgacagtcaggtgtatgctctggcgcagggcaatattctggttggcggcgcaggagcctctgctggcggtagcagtgttcaggtgaaccaactgaacggtggacggatcaccaatggtgcggttattgaacgtgaattgcccagccagtttggcgtcgggaatacccttaatttgcaacttaacgacgaagatttcagcatggcgcagcaaatcgctgacaccatcaaccgcgtgcgtggatatggcagcgccaccgcgttagatgcgcggactattcaggtgcgcgtaccaagtggcaacagttcccaggtccgtttccttgccgatatccagaatatgcaggttaatgtcaccccgcaggacgctaaagtagtgattaactcgcgcactggctcggtggtgatgaatcgcgaagtgaccctcgacagctgcgcagtagcgcaggggaatctctcggttacggtcaatcgtcaggccaatgtcagccagccagatacaccgtttggtggtggacagactgtggttactccacaaacgcagatcgatttacgccagagcggcggttcgctgcaaagcgtacgttccagcgccagcctcaataacgtggtgcgcgcgctcaatgcgctgggcgctacgccgatggatctgatgtctattttgcaatcaatgcaaagtgcgggatgtctgcgggcaaaactggaaatcatctgatgatcagcgacagcaaactactggcaagtgcggcctgggatgcgcaatcactcaacgaactaaaggcgaaagcgggcgaagatccagcggcaaatatccgtccggtggcccgccaggtggaagggatgttcgtgcagatgatgttgaaaagcatgcgcgacgctttaccaaaagatggcctgttcagcagcgagcacactcgcctgtataccagtatgtatgaccagcagattgcccaacagatgacggcgggcaaaggtctggggcttgcagagatgatggttaaacagatgacgccagaacaaccattgccagaggagcccacgccagcagcaccgatgaaattcccgctcgaaactgtggtgcgttatcaaaatcaggcgctttctcagctggtgcaaaaggccgtaccacgtaactacgatgattcgttgccgggtaacagtaaagcattcctcgcgcaactctcactgcccgcccaactggcaagccagcaaagcggtgtgccacatcatttgatcctcgctcaggcggcgcttgaatctggctgggggcaacggcaaatccgccgcgaaaacggcgagcctagttataacctgtttggcgtcaaagcctctggcaactggaaagggccagtcactgaaatcaccacgactgaatatgaaaacggcgaagcgaagaaagtaaaagcgaaatttcgggtctacagctcgtatctggaagcattgtcggattacgttgggctgttaacgcgtaacccgcgctacgccgccgtgacgaccgccgcgagtgcggagcagggggcgcaggccctacaggacgcgggctatgccaccgatcctcactatgcccgcaaactcaccaacatgattcagcagatgaaatcgataagcgacaaagtgagcaaaacctacagtatgaacattgataatctgttctgaataactcaagtccggcgggtcgctgccgataatactctgtaattgaaggcttataaggaacctccatgtccagcttgatcaataacgccatgagcggactgaacgcggcccaggcggcgttaaatacggcaagtaataatatctccagctataacgttgccggatatacccgccaaaccactattatggcgcaggccaatagcacgttgggcgctggcggctgggttggcaatggcgtctacgtttctggtgtgcagcgtgagtatgatgcgtttattaccaaccagttacgtgcggcgcagacgcaaagtagcggcctgactgcccgctatgagcagatgtcgaaaatcgacaatatgctctccaccagtacctcttcgctggcaacacagatgcaggatttcttcaccagcctgcaaacgctggtaagtaacgcggaagacccggcagcgcgccaggcgctgattgggaaatcagaagggttggtgaatcagtttaaaaccaccgatcaatatctgcgcgaccaggacaaacaggtcaatatcgcgataggtgccagcgttgatcagatcaacaattacgctaaacaaatcgccagcctgaacgatcaaatctcgcgtctgacaggcgtgggggcaggggcgtcacctaacaatctgctggatcaacgcgatcaactggtgagtgaattaaaccagattgttggcgtagaagttagcgttcaggatggtggcacttataacatcacgatggccaatggctactcactggttcagggaagtacggcgcggcagctggcggcagttccttccaccgccgacccttcgcgtacgactgtcgcttatattgatgggacggctggcaatattgagatcccggagaaattactgaataccgggtcgctgggcggcattctgacattccgttctcaggatctggaccagacgcgtaatacgcttggacaactggcgctggcatttgccgaggctttcaacacccaacacaaagccggatttgatgctaacggcgatgctggtgaagatttctttgctatcggtaagcccgcggtactgcaaaacacgaaaaacaaaggtgacgttgcgatcggtgccacggtaactgatgcctccgcggtactggcgacagattacaaaatctcgttcgataataatcagtggcaggtcacccgccttgccagcaataccacttttacggtgacgccggatgccaacggtaaagtggcatttgatggtctggagttgacgtttacaggaacgcctgccgttaacgacagcttcacgctgaaaccggtaagtgacgccatcgtcaacatggatgtattaatcaccgacgaagcaaaaatcgccatggcgagcgaagaagatgcgggtgatagcgacaaccgcaacggtcaggccctgctggatctgcaaagcaacagtaaaacggtgggcggtgcgaaatcctttaacgacgcttatgcctcattagtgagtgatatcgggaataaaaccgcgacgttgaaaaccagtagcgccacgcaaggtaatgtggtgacgcagctttccaatcagcagcagtcgatttccggtgtcaatctcgatgaggagtacggaaatctgcaacgttttcagcagtattacctggcgaatgcgcaggttctgcagacggcaaacgcgatttttgatgcgctgattaacattcgctaaggggagataaaatgcgtttcagtacccagatgatgtaccagcaaaacatgcgtggcatcaccaattctcaggcagaatggatgaagtacggcgaacagatgtcgacgggtaagcgagtcgttaacccttcagatgatcccattgctgcatcacaagctgttgttctctcccaggcacaggcacaaaacagccagtacacgctggcgcgtactttcgccactcaaaaagtgtcactggaagagagtgtgcttagccaggtcaccactgctatccagaatgctcaggaaaaaattgtctacgccagcaatggcaccttgagtgacgatgaccgggcctcgctggctacggatattcaggggcttcgtgaccagttactgaatctggcgaacaccactgacggtaacgggcgctacatttttgccggttataaaacagagactgcgccgtttagtgaggctgacggtgattatgtcggcggaacagaaagtattaaacaacaggtcgatgcttcgcgttcgatggtgataggacatacgggcgacaaaattttcgacagtattaccagcaacgcggtagcggaaccagacggtagcgcttctgaaaccaatctttttgccatgctggatagcgccatcgcagccctgaaaacgccggtcgcggatagcgaagcggataaagaaaccgccgctgcggcactggataaaaccaaccgcggactgaaaaactcgctgaacaatgtgctgactgttcgcgcggaattaggcacgcaactgaacgaactggagtcgctggattcattaggtagcgatcgcgctttagggcaaacgcagcagatgagcgatctggttgatgtggactggaatgcaactatttcatcttacatcatgcagcaaacggcattgcaggcatcgtataaagcatttaccgatatgcagggattgtcgctcttccagctcaacaaataagctcgctttaaaacatatcatgaaactgggtatgttttgtctgcccgctctgggatcgccggggcgggcatttttttgcctattttgtattgttggttagcaaggatgccatttgatgaattttaatatgttgactcaaagatgaaataaaaaagccctggcagttaccagggcttgattgcttgagctaattattactcaacaggttgcggacgcgcaggagcggcggaggcatgatgcgttgccgtatgaccacctgcggcacctttgccttcgaaggtaaaagtagggcgctgccagtcactgtgacgcggtgcttccggaacatattccggtgccggagcgcgcgtcatcggcgcggtagcgtggttatgctcaacggtgacctcaggttcaaccgcagctaccgtttcaacttctgctgtgacttcagcgacgactggcgcggcaggttgagcaacaacttcaggttcagcaaccacaacctcagcagtttcggcaacttcttcaatatctgccgtctcttcctgcggttcaaccaccggttctgcgtgttctgcaacttcctgggctacggcaacatcagattcggtaatcacctgcggctgttcagttaccgcggcagcaatcacttcaggatgcgtcgtttcaaccacttccggttgcggttcggcaacctgaacgggggcttctacgacttcagccacttcttcaacaactggcgcgctaacaacaggttcggcagcggcggcgacagggacctcagtcaccatcggctgcacttgtacttcttcctgttcgcgctgctcttcaacctgtacatcttgcggacgtacaattggatagcggatccagactttgccagaggccagttccggagacgcgcacgctacggtcaacggcattggcgactgggttggataacgctcgtcacgatagcgacgacgacgctgaccacttacgcgcaggtgacgaggcgagcggcgagaacgacgcggcatgccaccgttgtcacggttatcagcattgttctcttctggctgttctggtgcagtttgcgctacgactggcagcgggactttcaccagttctgtgcgtggggctggtgcttcctgaacaattggttcggctgcgacagtttcttcaaccaccggtgcgactaccgcttcttcggctacgctttgctcgtaacgcactttctgattgagctgacgctgtttacgacgtggctgaaccggacgtacacgttcttcctgttcggtttcctgaacagattgctcttcaacattcagcgccttcacttcttgttgcgcctgacgtttatcatcgttacggcggcggctacgttcacgacgcggcgtttgctgctcgtcggtggtacgcgctttttccgttacctctgcctgctgacggctctcacgcgtctcggcagtctgctgctgtgcctggcgacgattacgacggttttcttcgcgattatcgctgccttcagtacgttcactacgagggtcgcggcgctcattacggtcacggcggttgttctgacgaggcttgcgacgatcctgttgacgttccggtttcgcttctgctttcggtgttggttgctcggacggtttggtttcttcaccaccgctgaacagcgctttcagtgcgccgaagaagcggctcaacagcccaggttgggcaggagcggctggtgttgccggtgcagatttaggtgctggggctacgacaggcgcggcaggttcagctggcgttggtgctggcggcacatccggcatggcaaaggttgccagcgcaggttgttccggacgcttacgttcagcgaactcttcttcagacggcagcgccatcgcttcttcatgcagcttcggcagcatgtagcttaaggttggggtttcttcccctttgcgcacgcgcagcacatggtagtgcggggtttccatctgatcgtttggcacaatcacacagcgtacgccgtcctgacgagtttcaatcgcatttaccgcagaacgtttttcattcagcaggtaagaagcaattggcacaggaacaatggcgtgaacttcctgggtgttctctttcagcgcttcttcttcgatcagacgcagaatagagagcgacagcgattcgttgtcacgaacggtaccggtaccggagcagcgcgggcagacgtgatggctggattcacccagtgatgggctcaggcgctgacgggacatttccaacaggccaaagcgagaaatatggctgatttgaatacgcgcacggtcctgacgcaccgcttcacgcagacggttttctaccgcacgctggtggcgtacaggcgtcatgtcgatgaagtcgataacaatcaggccgccgaggtcacgcaggcgcagctgacgagcaatctcatcggcagcttcgaggttagtgttaaacgcggtttcttcgatatcgccgccgcgggtcgcgcgtgcggagttgatgtcgatggccgttaacgcttcggtgctgtcgataacaatcgaaccaccggatggcagacgaacttcacgctggaaggcggactcgatctgcgactcgatctggtagtggctgaacagcgggatctcgccggtgtacagtttgattttgctgctgaaatccgggcggcctaatgcagcgatatgctgacgtgccagttcgagcactttcgggttatcgataaggatttcaccgatgtcctggcgtaagtaatcgcggaatgcgcgaacgattacgttgctctcctgatgaatcaggaacggagccgggcggctttcagcggcttttttgatggcttcccagtgtttcagacggaagcttaaatcccattgcagcgcctcagcagatttgccgacgccagcggtgcgcacgataagccccatgccttccggcagttcaaggcttgccagtgcttcttttaattcggtacggtcgtcgccttcgatacgacgagaaataccgcccgcgcgcgggttgttcggcatcagaaccagatagctacccgccagactgataaaggtggttaatgccgcgcctttgttgccgcgctcttctttatcgatctgaacaatgacttcctgaccttcacgcaacacatctttaatgttgggacgaccatgagcactgtagttagcagggaaatattcgcgggcaatttcttttagtgggaggaaaccgtgacgttcagcgccgtaatcaacaaaagcagcttccagactcggttcaatgcgggtgattttacctttgtagatgtttgcctttttctgctcgtgccctggactttcgatatccaggtcatacagacgctgcccatctacaagggcaacgcgcaactcttcctgctgagttgcgttgattaacattcttttcatcgtaacttactcattattcttacattgacgactaagctgcgggcaaagtaacgcctttccgggtgtgaaccgatggcctcgtgtctagtcgcgtcgccaacctcacggttatcgtcagctcaaagaggcgcagagtgtcggttgcccgtttttcatgcggaaaaacagcgcaattatcagagaaacagactgggtattactctccagaaatatttccatctaccggtaaggactgcaacccgcagcccgctaactgcctgaaagatcaatacgtcttacgccattgctgcgtggatgatcggtcgggcaaaatgggttattccgtaaaatttcttgttttaacaaggatggacacggaaacggcctcattattccactgcaagccttgttatagcaagatgacttttaccatttatcacccgcttactcacagttttttcacttcttgctggtgattggtttaataaccatcaataaagtgatcacctagtgaagtaataaggtgcaaaactaaatataagcatagaaaaatgagtggcgcgaatcctgttggctaattagaatcgcccaccatgaaaacagagactccatccgtaaaaattgttgctatcaccgctgacgaagcggggcaacgtatcgacaactttttgcgtacccaattgaaaggcgtaccaaaaagtatgatttaccgtattttgcgtaaaggcgaagtgcgggtgaacaaaaaacgtattaagcctgaatataaactcgaagcgggtgatgaggtgcgtatcccaccggttcgcgttgctgagcgggaagaagaggcggtttcgccacatctgcaaaaggtggcggcgctggcggacgtcatcttatatgaagatgatcatatcctggtgctgaataaaccttccggtacggcggtacatggcggcagtggtttaagcttcggcgttattgaaggtttgcgggcgttgcgcccggaagcgcggttccttgaactggttcatcgtcttgaccgggacacctcaggtgtgttgctggtagcgaaaaaacgctcggcgttgcgttctctgcatgagcaattacgtgaaaaagggatgcaaaaagattacctggcgctggtgcgcggtcagtggcagtcgtatgtgaagagcgttcaagcgccgttactgaaaaatattctgcaaagcggcgaacgtatcgtgcgtgtgagtcaggaaggcaaaccgtcggaaacacgctttaaagtggaagaacgctatgcatttgccaccctggtgcgttgtagcccggtaacagggcgtactcatcagatccgtgtgcatacacaatatgcgggtcatccgattgcctttgacgatcgctacggtgaccgtgaatttgacagacagctcactgaagcaggcacgggattaaatcgcctgttcctgcacgccgcagcgttgaagtttactcatccggggaccggtgaggtgatgcgtattgaagcgccgatggatgaaggtttgaagcgttgtttgcaaaagctgcgtaacgcgcgctaatacaagcatataaacctgataatgggcggttggcctgataaggcgtttacgccgcatcaggccgccagcaccgattgccggatgcgaagtaaccgcatccggcgcaaaaaactatcccatcagcgggtttttcccttcccgacgtaacatctgacacagcgcgattagcggtaaaccaaccagcgtgttaggatcacgcccctctaaacgctcaaacagcgtaatgccaaatccttcactcttaaagctacccgcgcagtgcaggggatgctctttacgcacgtaattatcaatctccgcctcgctcaggtgacggaaatggacgtcaaaaggctccacttctgtttgtagatgcccattcgccgaattaaacaacgccagtccagtatagaaggtgacgatattgccgctggctttgcgtaattgcagacgggcattttcttccgttaacggtttaccggtgatttcgccatcaagaacacatacctggtctgaaccaataattaaatgatccggataacatgacgccagagattgcgctttttcttgtgccagtcgaagcaccaactgtcgcggtgattcgtcgctgcgtggagtttcgtcgacctcgggtgctgcacattcaaaagagatttgcagtttttccagaagagcgcgacgccagggcgaggtggaggctaaaataagtttaggcatatttttttccatcagatatagcgtattgatgatagccaatttaaactatgcgcttcgttttgctgactggcaactttgccagcactgaacgaaaataaggctgtaacccgcaatgtgtgcgaattattggcaaaaggcaaccgcaggctgcctttttctttgactatacgacgttacgaagttaatatgcgcgccctatgcaaaaggtaaaattacccctgactcttgatccggttcgtacggctcaaaaacgccttgattaccagggtatctatactcctgatcaggttgagcgcgtcgccgaatccgtagtcagtgtggacagtgatgtggaatgctccatgtcgttcgctatcgataaccaacgtctcgcagtgttaaacggcgatgcgaaggtgacggtaacgctcgagtgtcagcgttgcgggaagccgtttactcatcaggtctacacaacgtattgttttagtcctgtgcgttcagacgaacaggctgaagcactgccggaagcgtatgaaccgattgaggttaacgaattcggtgaaatcgatctgcttgcaatggttgaagatgaaatcatcctcgccttgccggtagttccggtgcatgattctgaacactgtgaagtgtccgaagcggacatggtctttggtgaactgcctgaagaagcgcaaaagccaaacccatttgccgtattagccagcttaaagcgtaagtaattggtgctccccgttggatcggggataaaccgtaattgaggagtaaggtccatggccgtacaacagaataaaccaacccgttccaaacgtggcatgcgtcgttcccatgacgcgctgaccgcagtcaccagcctgtctgtagacaaaacttctggtgaaaaacacctgcgtcaccacatcactgccgacggttactaccgcggccgcaaggtcatcgctaagtaatcacgcgtctgcgtgatgaagcttagtgaggattttccccaggcaactggggaaagaccaaaccgggcggcgacgataccttgacacgtctaaccctggcgttagatgtcatgggaggggattttggcccttccgtgacagtgcctgcagcattgcaggcactgaattctaattcgcaactcactcttcttttagtcggcaatcccgacgccatcacgccattacttgctaaagctgactttgaacaacgttcgcgtctgcagattattcctgcgcagtcagttatcgccagtgatgcccggccttcgcaagctatccgcgccagtcgtgggagttcaatgcgcgtggccctggagctggtgaaagaaggtcgagcgcaagcctgtgtcagtgccggtaataccggggcgctgatggggctggcaaaattattactcaagcccctggaggggattgagcgtccggcgctggtgacggtattaccgcatcagcaaaagggcaaaacggtggtcctcgatttaggggccaacgtcgattgtgacagtacaatgttggtgcaatttgccattatgggctcagttctggctgaagaggtggtggaaattcctaatcctcgcgtggcgttgctcaatattggtgaagaagaagtaaagggtctcgacagtattcgggatgcctcagcggtgcttaaaacaatcccttctatcaattatatcggctatcttgaagccaatgagttgttaactggcaagacagatgtgctggtttgtgacggctttacaggaaatgtcacattaaagacgatggaaggtgttgtcaggatgttcctttctctgctgaaatctcagggtgaagggaaaaaacggtcgtggtggctactgttattaaagcgttggctacaaaagagcctgacgaggcgattcagtcacctcaaccccgaccagtataacggcgcctgtctgttaggattgcgcggcacggtgataaaaagtcatggtgcagccaatcagcgagcttttgcggtcgcgattgaacaggcagtgcaggcggtgcagcgacaagttcctcagcgaattgccgctcgcctggaatctgtatacccagctggttttgagctgctggacggtggcaaaagcggaactctgcggtagcaggacgctgccagcgaactcgcagtttgcaagtgacggtatataaccgaaaagtgactgagcgtacatgtatacgaagattattggtactggcagctatctgcccgaacaagtgcggacaaacgccgatttggaaaaaatggtggatacctctgacgagtggattgtcactcgtaccggtatccgcgaacgccacattgccgcgccaaacgaaaccgtttcaaccatgggctttgaagcggcgacacgcgcaattgagatggcgggtattgagaaagaccagattggcctgatcgttgtggcaacgacttctgcgacgcacgctttcccgagcgcagcttgtcagattcaaagcatgttgggcattaaaggttgcccggcatttgacgttgcagcagcctgcgcaggtttcacctatgcattaagcgtagccgatcaatacgtgaaatctggggcggtgaagtatgctctggtcgtcggttccgatgtactggcgcgcacctgcgatccaacagatcgtgggactattattatttttggcgatggcgcgggcgctgcggtgctggctgcctctgaagagccgggaatcatctccacccatctgcatgccgacggtagctatggtgaattgctgacgctgcctaatgctgaccgtgtgaatccagagaattcaattcatctgacgatggcgggcaacgaagtcttcaaggttgcggtaacggaactggcgcacatcgttgatgagacgctggcggcgaataatcttgaccgttctcaactggactggctggttccgcatcaggctaacctgcgtattatcagtgcaacggcgaaaaaactcggcatgtcgatggacaatgtcgtggtgacgctggatcgccacggtaatacctctgcggcctctgtcccgtgcgcgctggatgaagctgtacgtgacgggcgcattaagccgggacagttggttctgcttgaagcctttggcggtggattcacctggggctccgcgctggttcgtttctaggataaggattaaaacatgacgcaatttgcatttgtgttccctggacagggttctcaaaccgttggaatgctggctgatatggcggcgagctatccaattgtcgaagaaacgtttgcagaagcttctgcggcgctgggctacgatctgtgggcgctgacccagcaggggccagctgaagaactgaataaaacctggcaaactcagccagcgctgttgactgcatctgttgcgctgtatcgcgtatggcagcagcagggcggtaaagcaccggcaatgatggccggtcacagcctgggggaatactccgcgctggtttgcgctggtgtaattgatttcgctgatgcggtgcgtttggttgagatgcgcggcaagttcatgcaagaagccgtaccggaaggcacgggcgctatggcggcaatcatcggtctggatgatgcgtctattgcgaaagcgtgtgaagaagctgcagaaggtcaggtcgtttctccggtaaactttaactctccgggacaggtggttattgccggtcataaagaagcagttgagcgtgctggcgctgcctgtaaagctgcgggcgcaaaacgcgctctgccgttaccagtgagcgtaccgtctcactgtgcgctgatgaaaccagcagccgacaaactggcagtagaattagcgaaaatcacctttaacgcaccaacagttcctgttgtgaataacgttgatgtgaaatgcgaaaccaatggtgatgccatccgtgacgcactggtacgtcagttgtataacccggttcagtggacgaagtctgttgagtacatggcagcgcaaggcgtagaacatctctatgaagtcggcccgggcaaagtgcttactggcctgacgaaacgcattgtcgacaccctgaccgcctcggcgctgaacgaaccttcagcgatggcagcggcgctcgagctttaaaagaggaaaatcatgaattttgaaggaaaaatcgcactggtaaccggtgcaagccgcggaattggccgcgcaattgctgaaacgctcgcagcccgtggcgcgaaagttattggcactgcgaccagtgaaaatggcgctcaggcgatcagtgattatttaggtgccaacggcaaaggtctgatgttgaatgtgaccgacccggcatctatcgaatctgttctggaaaaaattcgcgcagaatttggtgaagtggatatcctggtcaataatgccggtatcactcgtgataacctgttaatgcgaatgaaagatgaagagtggaacgatattatcgaaaccaacctttcatctgttttccgtctgtcaaaagcggtaatgcgcgctatgatgaaaaagcgtcatggtcgtattatcactatcggttctgtggttggtaccatgggaaatggcggtcaggccaactacgctgcggcgaaagcgggcttgatcggcttcagtaaatcactggcgcgcgaagttgcgtcacgcggtattactgtaaacgttgttgctccgggctttattgaaacggacatgacacgtgcgctgagcgatgaccagcgtgcgggtatcctggcgcaggttcctgcgggtcgcctcggcggcgcacaggaaatcgccaacgcggttgcattcctggcatccgacgaagcagcttacatcacgggtgaaactttgcatgtgaacggcgggatgtacatggtctgaccgcgatttgcacaaaatgctcatgttgcgcgcagtctgcgtggttatgagtaataattagtgcaaaatgatttgcgttattggggggtaaggcctcaaaataacgtaaaatcgtggtaagacctgccgggatttagttgcaaatttttcaacattttatacactacgaaaaccatcgcgaaagcgagttttgataggaaatttaagagtatgagcactatcgaagaacgcgttaagaaaattatcggcgaacagctgggcgttaagcaggaagaagttaccaacaatgcttctttcgttgaagacctgggcgcggattctcttgacaccgttgagctggtaatggctctggaagaagagtttgatactgagattccggacgaagaagctgagaaaatcaccaccgttcaggctgccattgattacatcaacggccaccaggcgtaagtgaacatctccaggcggtcgttcgaccgcctgagttttatcttttgtcccactagaatcattttttccctccctggaggacaaacgtgtctaagcgtcgtgtagttgtgaccggactgggcatgttgtctcctgtcggcaataccgtagagtctacctggaaagctctgcttgccggtcagagtggcatcagcctaatcgaccatttcgatactagcgcctatgcaacgaaatttgctggcttagtaaaggattttaactgtgaggacattatctcgcgcaaagaacagcgcaagatggatgccttcattcaatatggaattgtcgctggcgttcaggccatgcaggattctggccttgaaataacggaagagaacgcaacccgcattggtgccgcaattggctccgggattggcggcctcggactgatcgaagaaaaccacacatctctgatgaacggtggtccacgtaagatcagcccattcttcgttccgtcaacgattgtgaacatggtggcaggtcatctgactatcatgtatggcctgcgtggcccaagcatctctatcgcgaccgcctgtacttccggcgtgcacaacattggccatgctgcgcgtattatcgcgtatggcgatgctgacgtgatggttgcaggtggcgcagagaaagccagtacgccgctgggcgttggtggttttggcgcggcacgtgcattatctacccgcaatgataacccgcaagcggcgagccgcccgtgggataaagagcgtgatggtttcgtactaggcgatggtgccggtatgctggtacttgaagagtacgaacacgcgaaaaaacgcggtgcgaaaatttacgctgaactcgtcggctttggtatgagcagcgatgcttatcatatgacgtcaccgccagaaaatggcgcaggcgcagctctggcgatggcaaatgctctgcgtgatgcaggcattgaagcgagtcagattggctacgttaacgcgcacggtacttctacgccggctggcgataaagctgaagcgcaggcggtgaaaaccatcttcggtgaagctgcaagccgcgtgttggtaagctccacgaaatctatgaccggtcacctgttaggtgcggcgggtgcagtagaatctatctactccatcctggcgctgcgcgatcaggctgttccgccaaccatcaacctggataacccggatgaaggttgcgatctggatttcgtaccgcacgaagcgcgtcaggtcagcggaatggaatacacgctgtgtaactccttcggcttcggtggcactaatggttctttgatctttaaaaagatctaagttgtcatttcccacccttataaaaggtccgcttgcgggccttttttcttagcttttattccgacttgttccgtagtgaacatgctgccacactaacaattctctgataaggagctggtatgttcttaattaacggtcataagcaggaatcgctggcagtaagcgatcgggcaacgcagtttggtgatggttgttttaccaccgccagagttatcgacggtaaagtcagtttgttatcggcgcatatccagcgactacaggatgcttgtcagcggttgatgatttcctgtgacttctggcctcagcttgaacaagagatgaaaacgctggcagcagaacagcagaatggtgtgctgaaagtcgtgatcagtcgcggtagtggcgggcgagggtacagcacattgaacagtggaccggcaacgcggattctctccattacggcttatcctgcacattacgaccgtttgcgtaacgaagggatgatgttggcgctaagcccggtgcggctggggcgcaatcctcaccttgcaggtattaaacatcttaatcggcttgagcaagtattgatccgctctcatcttgagcagacaaacgctgatgaggcgctggtccttgacagcgaagggtgggttacggaatgctgtgcggctaatttgttctggcggaagggcaacgtagtttatacgccgcgactggatcaggcaggtgttaacggcattatgcgacaattctgtatccgtttgctggcacaatcctcttatcagcttgtcgaagtgcaagcctctctggaagaggcgttgcaggcagatgagatggttatttgtaatgcgttaatgccagtgatgcccgtacgtgcctgtggcgatgtctccttttcgtcagcaacgttatatgaatatttagccccactttgtgagcgcccgaattagtcatgaaaaaagtgttattgataatcttgttattgctggtggtactgggtatcgccgctggtgtgggcgtctggaaggttcgccatcttgccgacagcaaattgcttatcaaagaagagacgatatttacccttaagccagggaccggacgtctggcgctaggtgaacagctttatgccgataagatcatcaatcgcccacgggtttttcaatggttgctgcgtatcgaaccggatctttctcactttaaagccgggacttaccgctttacaccgcagatgaccgtgcgcgagatgctgaaattgttggaaagcggtaaagaagcacagttcccgctgcgactggtagaagggatgcgtctgagcgactacctcaagcaattgcgtgaggctccgtatatcaagcacacgctgagcgacgataagtacgccaccgtagcgcaggcacttgaactggaaaacccggagtggattgaaggttggttctggccagacacctggatgtataccgccaataccaccgatgtcgcgttactcaagcgagcgcacaagaaaatggtgaaagcggtcgatagcgcctgggaagggcgtgcggacggtctgccttataaagataaaaaccagttggtgacgatggcatcaattatcgaaaaagaaaccgccgttgccagtgaacgcgatcaggttgcctcagtatttatcaaccgtttacgcattggtatgcgcctgcagaccgacccgaccgtgatttacgggatgggagagcgttataatggcaaactttctcgtgcagacctggaaacgccgacagcgtataacacctataccattaccggtctgccgccaggtgcgatagcgacgccgggggcggattcgctgaaggctgctgcgcatccggcaaaaacgccgtatctctattttgtggccgatggtaaaggtggtcacacgtttaataccaatcttgccagtcataacaagtctgtgcaggattatctgaaagtgcttaaggaaaaaaatgcgcagtaagtatatcgtcattgaggggctggaaggcgcaggcaaaactaccgcgcgtaacgtggtggttgagacgcttgagcaactgggtatccgcgacatggttttcactcgggaacctggcggtacgcaacttgccgaaaagttaagaagccttgtgctggatatcaaatcggtaggcgatgaagtcattaccgataaagccgaagttctgatgttttatgccgcgcgcgttcaactggtagaaacggtcatcaaacctgcgctggctaacggcacctgggtgattggcgatcgccacgatctctccactcaagcctatcagggtggaggacgaggtattgaccaacatatgctggcaacactgcgtgatgctgttctcgggggggttcgccccgacttaacgctctatctcgatgttaccccggaggttggcttaaaacgcgcgcgtgcgcgcggcgagctggatcgtattgagcaagaatctttcgatttctttaatcgcacccgcgcccgctatctggaactggcagcacaagataaaagcattcataccattgatgccacccagccgctggaggccgtgatggatgcaatccgcaccaccgtgaccaactgggtgaaggagttggacgcatgagatggtatccatggttacgacctgatttcgaaaaactggtagccagctatcaggccggaagaggtcaccatgcgctactcattcaggcgttaccgggcatgggtgatgatgctttaatctacgccctgagccgttatttactctgccaacaaccgcagggccacaaaagttgcggtcactgtcgtggatgtcagttgatgcaggctggcacacatcccgattactacaccctggctcccgaaaaagggaaaaatgcgctgggcattgatgcggtacgtgaggtcaccgaaaagctgaatgagcacgcacgcttaggtggtgcgaaagttgtctgggtaaccgatgctgccttactaaccgacgccgcggctaacgcattgctgaaaacgcttgaagagccaccagcagaaacgtggtttttccttgctacccgcgagccagaacgtttactggcaacattacgtagtcgttgtcggttacattaccttgcgccgccgccggaacagtacgccgtgacctggctttcacgcgaagtgacaatgtcacaggatgcactacttgccgcattgcgcttaagcgccggttcgcctggggcggcactggcgttgtttcagggagataactggcaggctcgtgaaacattgtgtcaggcgctggcatatagcgtgcaatcgggcgactggtattcgctgctggcggcccttaatcatgaacaagctccggcgcgtttacactggctggcaacgttgctgatggatgcgctaaaacgccattatggcgctgcgcacgtgaccaatgttgatgtgccggggctggtcgtcgaactggcaaaccatctttctccctcgcgcctgcaggctatactgggggatgtttgccacattcgtgaacagttaatgtctgtcacaggtatcaaccgcgagcttctcatcaccgatcttttactgcgtattgagcattacctgcaaccgggcgttgtgctaccggttcctcatctttaagagagacatcatgtttttagtcgactcacactgccatctcgatggtctggattatgaatctttgcataaggacgtggatgacgttctggcgaaagccgccgcacgcgatgtgaaattttgtctggcagtcgccacaacattaccgggttatttacacatgcgggatctggtaggcgaacgcgacaacgtcgtattttcttgtggcgtgcatccactcaaccagaatgatccctacgatgtagaagatttacgtcgtctggcggcagaagagggcgttgtagcgctgggtgaaaccgggctggattattattacacgccggaaactaaagtacgtcagcaagagtccttcatccatcatatccagattggtcgtgaactgaacaagccggttatcgtccacacccgtgacgcccgcgccgatacgctggcaattctgcgcgaagaaaaagtgacggattgcggtggcgtactacactgttttacagaggacagagaaacggcgggcaaattactggatctcggattttacatctccttttccggcattgtgaccttccgtaatgcggagcaactgcgcgatgctgcgcgttatgtccccctggatcggttactggtggaaactgactcaccttaccttgcgccagtaccgcatcgaggaaaagagaatcaacctgcgatggttcgtgacgttgcagaatacatggctgtgttgaaaggtgttgccgttgaagaactggcgcaggtaaccaccgataacttcgcccgtctgtttcacatcgacgcttcccgccttcaatccatccgttgaatgagtttttttaaagctcgtaattaatggctaaaacgagtaaagttcaccgccgaaaatcgggcggtgaataaccacgtttgaaatattgtgacatatgttttgtcaaaatgtgcaacttctccaatgatctgaagttgaaacgtgatagccgtcaaacaaatcggcactgaattattttactctgtgtaataaataaagggcgcttagatgccctgtacacggcgaggcactccccccttgccacgcgtgagaacgtaaaaaaagcacccatactcaggagcactctcaattatgtttaagaatgcatttgctaacctgcaaaaggtcggtaaatcgctgatgctgccggtatccgtactgcctatcgcaggtattctgctgggcgtcggttccgcgaatttcagctggctgcccgccgttgtatcgcatgttatggcagaagcaggcggttccgtctttgcaaacatgccactgatttttgcgatcggtgtcgccctcggctttaccaataacgatggcgtatccgcgctggccgcagttgttgcctatggcatcatggttaaaaccatggccgtggttgcgccactggtactgcatttacctgctgaagaaatcgcctctaaacacctggcggatactggcgtactcggagggattatctccggtgcgattgcagcgtatatgtttaaccgtttctaccgtattaagctgcctgagtatcttggcttctttgccggtaaacgctttgtgccgatcatttcaggcctggctgccatctttactggcgttgtgctgtccttcatttggccgccgattggttctgcaatccagaccttctctcagtgggctgcttaccagaacccggtagttgcgtttggcatttacggtttcatcgaacgttgcctggtaccgtttggtctgcaccacatctggaacgtacctttccagatgcagattggtgaatacaccaacgcagcaggtcaggttttccacggcgacattccgcgttatatggcgggtgacccgactgcgggtaaactgtctggtggcttcctgttcaaaatgtacggtctgccagctgccgcaattgctatctggcactctgctaaaccagaaaaccgcgcgaaagtgggcggtattatgatctccgcggcgctgacctcgttcctgaccggtatcaccgagccgatcgagttctccttcatgttcgttgcgccgatcctgtacatcatccacgcgattctggcaggcctggcattcccaatctgtattcttctggggatgcgtgacggtacgtcgttctcgcacggtctgatcgacttcatcgttctgtctggtaacagcagcaaactgtggctgttcccgatcgtcggtatcggttatgccattgtttactacaccatcttccgcgtgctgattaaagcactggatctgaaaacgccgggtcgtgaagatgcgactgaagatgcaaaagcgacaggtaccagcgaaatggcaccggctctggttgctgcatttggtggtaaagaaaacattactaacctcgacgcatgtattacccgtctgcgcgtcagcgttgctgatgtgtctaaagtggatcaggctggcctgaagaaactgggcgcagcgggcgtagtggttgctggttctggtgttcaggcgattttcggtactaaatccgataacctgaaaaccgagatggatgagtacatccgtaaccactaatccgtaagacgttggggagactaaggcagccagatggctgccttttttacaggtgttattcagaattgatacgtgccggtaatgctgaaattacgcggtgcgccgtagacgatagaaccttccacgttggtatcgtaggttttgtcgaacaggttattgacgttcccctgtaacgagaagtttttcgtcacctggtagcgggtgaagagatccaccagcgcgtagctaccttgctcggcgcggaaggtgccatacggtgtcacggtgtcggtatacacgcgattttgccagttaacaccaccgccgaccgtcaactctggcatgacaggcaaccggtagctggtgaacattttaaccgtggtgcgtggcagattaggattaacggcgtttccttcgttatcttctgcaatatagcgcgttgcgccaaacgtcagctgccagttgtcggtaattgcgccgttgagttcaaattccacacctttactgactgtcccatccaccgctttataggcggtttcgccgttgctgccggggataggtgtaccggtggactgagcgacattatcctgctcaatacggaagatggctaacgtggtggtcagacggctattcatccagtccgatttcagacccagctcgtagttgttaccggtgattggagtcagatatttgcctgaactgtcacgatcattttgcggctggaaaatagaggtatagctggcgtaggtcgaccagttgtcattgatgtcaaacaccagaccagcgtaaggcgtggtgtggtttttctccatgctgtaagtcagcgtatcaacccgccagttggtataacgtgcgccgaggatcagatgcagcggatcggcaagggtgacacgagtggcagcatataacgatttcatatgtgtggtatcgtcctgcgccaggctctgtggtgaccagtcggtttgtgggaaattgccattaaagttgtagaaactgccaatttcatccgggaagatgttggcccatgaactgaagtaacgattgttttgtttgctgtaactgccaccaaacattagattgtgctgacgaccaaacaattcataactaccgtcagcgaacaaatccagcgcatcaactttacgtttgccgctgttccaaccggtgccgccgacataatcaaaaccaggtccataattactgtatggcccaaccagcataccatccgctttgtttacataggcatcgacatacatcattttgctgtcaaattcgacttcagagtgggtggcattcagcgtcgcttgccaggtatcagcaaaccgctgcttcagggtcataaagaccttgttgatctctttatcgttgtacgcccagtcaggtgcggtactgcgtgcgcgatcgtaactgttgctgctgccatcagtattccagcgcggtaaaccaccccaggttgggctattaacatcaatacgctgatattcgtaaccggctgaaagcatcgtaagatcgcctaaatcagcatcgacaatgccggagaagaaggtcttttcactgttgtagcggtccagccatgagtcgttattctggtagccgccgacaattcgtgcgcggattttaccatcttcggtgagtgggctttgtaaatccgccacataccgttctttgttccagctaccgtattccgccgagacatcgcctttaaattcacgactggtcgcgtgttttcgaaccatattaattgccgcagatggattacccgtcccggtcatgaggcctgtcgcgccacgcactacttctacgcgttcaaacagtgccatatcagaaagtgcgtcgcccagattccagcgcgattcaaaataggtggggataccatcaaccatatagttatcgatctggaatccgcgggaataataaagagcacgatcggaatccgcctgacttttgctgatccccagcgtgttttccatcacttcgcccagcgtttgtaactgctgatcttccatccgctgctggctaacaatagtgaccgactgaggaatatcacgttgagtcatctgcatttttgtacccgcagaggtagacgttacgttgtaatcattttcgccatcatctggggctgtggctgaaccctcaacaatcaccgtttcttcagtgactggtgcagcaaaagcggcggaaggtaatagtgccagtgctatgcaaccggcaaggagtgacggtttgatgatagcttgatgttgattatccctgttaaattgtgtcgaaagcatttgaaatctcttggtttatgttggcgtcaggctcatgccggagcagggtgatgagcggttatatttagtgtgcgaataattttatatgtaaatgcaaatgagaaatatacgcattcatatttagtgtgtaaaccaaacagagaatgtcttttcagcgcattcgcaggcagaaatgggaataatggcgatatatacggcagcaaaacgattttttgcttaagaaatcgttagttaaggttgaaagagcaggtttaactcgaccatactctatactcgcagtgtggcgcggcgtagcatggcgcaacgcatggctatttgaaaaaggaaaatgtcgtggcagaagaaactatattcagcaaaattattcgtcgtgagatcccctccgatatcgtctaccaggatgatctggtaacggcgtttcgcgatatttcgccgcaagcgccaacgcatattctgatcattccgaatatcctcattccgacagtgaacgacgtgtcagctgagcatgagcaggcgctgggacgcatgatcaccgtagcggcaaaaattgctgagcaagaaggtattgccgaagatggctatcgtctgatcatgaacaccaaccgccatggcggacaagaggtttaccacatccatatgcatttgttgggtggctgtccgctgggaccaatgctggcgcataaaggtctgtaacgatgagaaaaggatgctttgggctgatgtctctggcgttgttagtgctggtgggctgtcgttcacatccggaaattccggtgaatgatgagcaatcgctggtgatggagtcatctttattagctgcgggcatcagtgcagaaaagcccgtcctttcgacatctgatattcaaccttcagcatcctcaacgctttataacgaaaggcaagaacccgttaccgttcattatcgtttttactggtatgacgccagagggctggagatgcatcctctggaaaggccacgcagcgttaccattcccgcacattcggcggtcacgctgtacggcagcgccaattttctgggggcgcacaaagtcagactttatctatatttgtaaggggtgaatcttgatgacaaaaatgagtcgctacgccttgattaccgcgctggcgatgtttcttgccgggtgtgtggggcaacgtgaacctgcaccggtagaagaagtgaaaccagcgccggaacaacctgctgagccacaacagcctgtccccacagtgccatcggtgccgacgataccgcagcagccaggcccaattgagcacgaagatcaaactgcaccgcttgcgccgcatattcgccattatgactggaatggcgcaatgcagccgatggtcagtaagatgcttggggctgacggcgtgactgcgggtagcgtcctgctggttgatagcgttaacaaccgtactaacggttcgttgaatgccgcagaagcgaccgaaacgctgcgaaatgcgctggctaataacggtaaatttaccctggtttccgcccagcagctgtcgatggctaagcaacaattaggtttatcgccgcaggacagtttaggcacccgtagtaaagccataggcattgcccgcaatgttggcgctcattacgtgctgtactccagcgcctctggcaacgttaacgctccgaccctacaaatgcagctgatgctggtgcagacgggcgaaattatctggtcaggtaaaggtgccgtttcgcagcaataatcccctcacgcgcgacgaattgctgtcgcgctttttcccgcagtttcatcccgtcacgacgtttaatagtgggcttagtggcgggagttttctcattgaacatcagggccagcgttttgttgtgcgtcagccgcacgatcctgatgcgccgcagtccgcgttcttgcgacagtatcgggctttatcacaactacccgcatgcattgcaccgaagccgcatttatatctccgtgactggatggtggttgactatctgcccggcgaggtaaaaacgtatttgccggataccaacgaactggcaggcttgctgtattatctacatcaacaaccgcgttttggctggcgaataacgctgttgccgttactggaactgtactggcagcaaagcgatccggcgcggcggacagtgggttggctgcgaatgttaaaacgtctgcgcaaagcgcgggaaccacggcttttacgcttaagtccattgcatatggatgtccacgccggaaatttagtgcatagcgcgtcagggttaaaactcatcgactgggagtatgccggagatggtgatatcgcgctggaactggcggcggtgtgggtggaaaatactgaccagcatcggcaattggtcaatgactatgccactcgcgcgaagatttatccggcgcaattatggcgtcaggtcaggcgatggtttccctggctgctgatgctcaaagcagggtggtttgagtaccgctggcgacaaaccggcgatcaacaatttatcaggctggccgatgacacctggcggcagctattaataaaacaataaggagagcagtgtgggtccagtaatgttggatgtcgaaggttacgaactggacgcggaagagcgtgaaatactggcgcatccgctggtgggagggctgattctctttacgcgaaactatcatgatcctgcccagttacgtgaactggtgcgccagatccgcgcagcatcgcgcaatcatctggtggtggcggtagatcaggaaggtggacgcgtgcagcgttttcgtgaaggttttacccgcttgccagcggcacaatcattcgctgcgctgttgggaatggaagaaggcggaaaactggggcaagaggcaggttggttgatggccagcgaaatgattgctatggatattgatatcagctttgcgccagtgctggacgtcgggcatatcagcgcggcgattggcgagcgttcttatcatgccgatccacaaaaagctctggcaattgccagccgttttattgatggtatgcatgaagcgggaatgaaaactaccgggaaacacttcccaggtcacggtgcagtaacggcagactcacacaaagaaacaccgtgcgacccacgtccgcaagcggagattcgcgctaaagatatgtcggtcttcagttccttaatccgcgaaaataaactcgacgccattatgcctgcgcatgtgatctacagtgatgttgatccgcgtccggcgagcgcttctccctactggctgaaagccgttttgcgtcaggaattgggttttgacggcgtgattttctctgacgatttatcgatggaaggcgcagcgattatgggcagttatgccgagcgtggacaggcatcactggatgcaggttgcgatatgatcctggtctgcaataatcgtaaaggggccgtcagcgtgttagataatctgtcaccgatcaaggcagaacgtgttacacgtttgtatcataaaggttcattttcgcgacaggaactgatggactcggctcgctggaaagcgatcagcgcccgtctgaatcagttacatgaacgctggcaggaagagaaggcaggtcattaaccctggcttatgtgaggaagcgatgattatctatttgcacggttttgactctaacagtccgggtaaccacgagaaagtcttacaattgcagtttattgacccggatgtacggctaataagctacagtacgcggcatccgaaacatgatatgcagcatttgctcaaagaagtggacaaaatgttgcaactgaacgtcgacgagcgcccgctcatttgtggtgttggtctgggcggttattgggctgagcggattggttttctctgtgatatccgccaggtgatcttcaaccccaatttgttcccttatgagaacatggaagggaagattgatcgcccggaagagtatgccgatattgccactaagtgtgtgaccaacttccgtgagaagaatcgcgatcgttgcctggtgattttgtcgcgtaatgatgaagcgcttaacagccagcggacatctgaagagttgcatcattattacgagattgtctgggacgaagagcagacgcacaaattcaagaatatctccccgcatttacagcgcattaaagcgttcaaaaccctcgggtaaatgccctcgtcgcatcaggtaaccttgccggtacctgatgcgctccggattctgtgggttggataaggcgttccgccgcatccgacagtcgagcatcaatgcctgatgcgcctcttatcaggcctaccgaatgccctccatacacacctcactctatatcactctcacaaatcagctcaaataataaacaacaaactctgttttttgatctcacccggtaaagtcgcctatcttttcagcaacaaaacttgattaacatcaattttggtatgaccaatgcaccattcatgttattctcaatagcgaagaacattttcattgctgtaacctgttgttaattaagagctatgttaataaccattaattaacaattggttaataaatttaagggggtcacgttgactacgccattgaaaaaaattgtgattgtcggcggcggtgctggtgggctggaaatggcaacacagctggggcataagctgggacgcaagaaaaaagccaaaattacgctggtcgatcgtaaccacagccacctgtggaaaccgctgctgcacgaagtggcgactggctcgcttgatgaaggcgtcgatgcgttgagctatctggcccatgcgcgcaatcatggtttccagttccagctgggttccgtaattgatattgatcgtgaagcgaaaacaatcactattgcagaactgcgcgacgagaaaggtgaactgctggttccggaacgtaaaatcgcctatgacaccctggtaatggcgctgggtagcacctctaacgatttcaatacaccaggtgtcaaagagaactgcattttcctcgataacccgcaccaggcgcgtcgcttccaccaggagatgctgaatctgttcctgaaatactccgccaacctgggcgcgaatggcaaagtaaacattgcgattgtcggcggcggcgcgacgggtgtagaactctccgctgaattgcacaacgcggtcaagcaactgcacagttacggttataaaggtctgaccaacgaagccctgaacgtaacgctggtagaagcgggcgaacgtattttgcctgcattgccgccacgtatctctgctgcggcccatagtgagttaacgaaacttggcgttcgcgtgctgacgcaaaccatggtcaccagtgctgatgaaggcggcctgcacactaaagatggcgaatatattgaggctgatctgatggtgtgggcagccgggatcaaagcgcctgacttcctgaaagatatcggtggtcttgaaaccaaccgtatcaaccagctggtggtggaaccgacgctgcaaaccactcgcgatccagacatatacgctattggcgactgcgcgtcatgcccgcgtccggaagggggctttgttccgccgcgcgctcaggccgcacatcagatggcaacctgtgcaatgaacaacattctggcgcagatgaacggtaagccgctgaaaaattatcagtataaagatcacggttcgctggtatcgctgtcgaacttttccacagtcggtagcctgatgggtaacctgacgcgcggctcaatgatgattgaaggacgaattgcgcgctttgtatacatctcgctgtaccgaatgcaccagattgcgctgcatggttactttaaaaccggattaatgatgctggtggggagtattaaccgcgttatccgtccacgtttgaagttgcattaatcggcttgtactggcggatgcggcgtaaacgccttatccgccctggacaaatggtacgagcggtaggcctgataagacgcgttaagcgtcgcatcaggcattccttcagactcctccgaatccctaagtatttccagccattcccgcgcttttcatcttctgtctgatagctgcttttctccttcgcttgcatgattggcataacagcaaagaaggaggtattcccgtgaataagtcaatgttggcgggtatcgggattggtgtcgcagctgcgctgggcgtagcggcagtggccagtctgaacgtgtttgaacgtggcccgcaatacgctcaggttgtttctgcaaccccaatcaaggaaacggttaaaacaccgcgtcaggagtgtcgcaacgtcacagtgacccatcgtcgaccggtgcaggatgaaaatcgcattaccgggtcggtgctcggcgctgttgctggcggcgtgatagggcatcagtttggtggtggtcgcggtaaagatgtcgccactgttgtgggggcgctgggtggtggatatgccggtaaccagatccagggctctctccaggaaagcgatacttacacgactacgcaacagcgttgtaaaacggtgtatgacaagtcagaaaaaatgctcggttatgatgtgacctataagattggcgatcagcagggcaaaatccgcatggaccgcgatccgggtacgcagatcccgctagatagcaacgggcaactgattttgaataacaaagtataacaaggctgtactctgcaatttggccccttattcgctcaggctgaggggctttttttgcgacttatttcaccagttcgggccataaacgcaaagtcgttccggcaatctgcatcagtttttccagcgatgcaccttcgcgtgcgctgatcgacatcccctgaataatacaattaaggaattctgccagatgcgtcacgtcacagtgggtcgggatttccccgcgcgcttgtcgttgacataaaaactgctgcaaagtgcgctcttgcatcgcatggcgtgatttcagcgtattggcgatatctcctgaatccggggagagggtggtgcagttgttgatcatgaagcagcctgccggggtgtctttgctggtaaagcagttggcgatggcagcaaaatagtcagccagcgcagactccacgcttttctcttcacaaaacagctgtgcttcatgcttagcggcaaagcgatcgatataacggtcgagtacggcgcgaaataacccctctttgttggtaaattccgcgtatagcgtgggcgctttggctccggtcgcttcgacgaggtccgcaagagaagtcgcttcataaccgtgctgccagaacaatttcatggccttatcaagcgcggcatccctgtcgaacacttttgggcggccgcggcttttttttacacattgtgttgagtcagttgccatgatgccgttgtacctggtgactgtgaatgaaaggttattataaaaataatcatctccgttcaccagtccacaaaccataaaaataattgctttctatttaactgaaatttaaagatttttaaattaattaatgattgttataaaaaatatcttgtatgtgatccagatcacatctatcatttagttatcgatcgttaagtaattgcttgcgacgtcattcatctgcataaggccactattatgaaaaacgtaaaaaccctcatcgctgcggcgattttaagctcaatgtcatttgccagctttgcggctgtcgaagttcagtcaacgccagaaggccaacaaaaagtcggtactatcagtgctaacgcggggacaaatctgggatcgctggaagagcagctggcgcaaaaagcggatgagatgggcgcaaaatctttccgtattacttctgtaaccggtccgaataccctccatggaacagcagtaatttataaataagcattaaccctcattaatgcctgctactgctgattttttccccgcgacatgctgtgtcgcggggatttttttatccgagctttacagagtttgtgggctcacttgatgacggcggacatccaccggcatcccggaacggacatccatcacatgttgcatcacttcagcgtcagtttgtgctgcatctttaaatgattgcattgcgctattcagcgtaattggcagcagctgcggatcgtcatcaatcttctctgacagcggctgatgtacttcaaccagacgcgcaccgtttggttcggcagagattttaatcggggtgttgatgatattcactttggtgcctggggtgacctggctaaagagtgttttgatatcgtcatcccgcagacgaatacagccagaacttacccgcatgccaatgccgaaatcagcgttcgtaccgtgaagcaaataaacgccgccataggccgccagacgaatcgcatgatggcccattgggttatccggtccagccggaactaccgcaggcaactcaattccctgtgccttataccgcgcgcgaatgtttgccgttggcgtccaggttgggtttgcacgcttgtcagaaacagtggtcaccattgtcggtgtcagcgtgtcaccacctaactgaccaatgccgatgggatatacggttaccgaattttttcccggcggataataatagagacgcagctccgcaatgttgatcacaatgccttcgcgcggcgcgtctggaagtagggtttgcaacgggatcgttaacacgctacccgcgcgcggtacgtaaggatcaacgccggggttagcctgtaacagagcgagaaagccgacgttatattttttggcgatcgcttccagagaaccaccgtcattttccaccacatgaaatttgttttcaccaaccagacgactgtccgctgacggcagcggccaggtgttggcttttgccggtagcgccagcgccacggcagcggcgaacgtaaaaaacgttagccagcgagaaaaacgcgttttgatcatcaccaaagtcaataataaatataaggttattgtaataaaaaagtaagtctgaattatggagggtgacagtgtcggataatgcagggaagtgcaaagaatttgtaaatattgcagatgggggcgcagagacgcccccgatttaccatcaagcgatcgcgttctcttccagttcacgcataaactggcgtacccattcgatacgcgttttccgctcgctcaaatcctgaataaacttcagacgcgtcggaccatcaaggcggtaatgctgcggctgtttttgcagcaaaccaatcaaccaggctggattaacgtgattcttctcggcaaattcgatcacgccgcctttctcattaccttccagcttcctgatccccagtttctgcgcttgctggcgcagacgggcaatatccagcagggtacgcgccggatccggcagcaggccgaagcgatcgataagctcgactttgatctcttccagttcgttttccgttttggcgctggcaatacgtttgtagaacgacagacgcgtgttcacgtcagggatgaaatcatctggcaatagcgacggcatccgcaggtcgacttctgtttgctggctggtgagatcttccagcgacggctcgcgtccggctttcagcgcatcgacggcgttttccagcaactccatatacagcgagaaaccgatggtttccattgagccgctttgttcttcgccaagcagttcacctgcgccgcggatctccagatcgtgcgttgccagcgcaaaacctgcaccgagatcttccagcgaggcaatcgcttcaagacgtttttgcgcatcggtagtcatcgcttttggatgcggcgtcagtagccatgcatatgcctggtggtgagaacgcccgacgcgaccgcgcaactggtgcaactgtgccagaccgaagtgatccgcgcgttcaatgataatggtgttggcggtaggaatgtcgatcccggtttcgataatggtggtacaaaccagcacgttgaaacgttgatgatggaaatcattcatcacccgttccagttcgcgctcacgcatttgcccgtgaccgatggcaatccgcgcttcaggtaccagttctgccagccgttcggcggctttctggatgttttccacatcattgtagagataataaacctgtcctccgcgcaaaatttcacgcaggatcgcctcccggaccaccagactgtcatactcacggacaaaggttttaactgccagacgacgggcgggcggcgtggcgataatcgacagatcgcgcattccgctcattgccatattcagcgtacgtgggatcggcgttgcggtaagcgtcagaatatccacgttcgcgcgcatcgctttaatgcgctctttatgacgcaccccgaagcggtgttcttcatcgacaatcagcaggcctaaatctttaaacttgacgtcactttgcagcagtttgtgcgtaccgatcagaatatcgattttcccttccgccacttccgcaaggatttgcgtctgctctttggcgctgcggaaacgggagatcatttcgatacgtaccggccagttggcgaaacggtcgcggaagttgtcgtaatgctgctgcgcgagaagggtggtaggcaccagcaccgccacctgtttgtggttatctaccgccaggaaagcggcgcgcatcgccacttctgttttaccaaagccaacatcgccgcacaccagacgatccattgccagcggctgacacatgtcgctaagcaccgcattaatggcctgcgcctgatccggcgtggtttcaaacgggaagctgtcgcagaataactgatactgctcgcgatcgtgtttaaacgcgaagccctctttggcggcgcgttgcgcgtagatatccagcaattccgccgccacatcacgcactttttccgccgctttctgccgtgcgcgtgaccaggcatcgccaccaagtttatgcagtggtgcgttttcttctgcgccacccgcgtaacggctaatcagatgcagtgacgacaccggaacatacagtttggcgtcgttggcataggtgagcatcaaatactcgccagtaatgcctccagcttcgagcgtggtcattccggcataacgaccgacgccgtgctccagatggaccaccggctgaccaatatgcagctccgcaaggttacggatcagtgtatcggggttgatggcgcggcgagaatcctgacgacgacgggcaacgcgttcaccgagcagatcgctttcgcaaatcagcgccaggttacgcatcgtatcgacaaaaccatgttcggcagcgccaatcatcagataacgcccacggtcgctggcttcatcaagacgcataatgcgttgcggagcaattttaattcgcgcgagcagttcacccaacgcttcacggcggccttcactttctaccgagaacaccaccggaccgtcgaaagactcgaggaacttacgcagcgcatccagcggcgctttttgttgtgcctgaatggccaggtctggcagtttctggaaacctaaattggcattcgctgcttttgtcggtaaatgttcagtttttagctgcacacggggccagtttttcagctctgagaagagctcatccacccgcagccagagcgattgtggtggcaacagtgggcgcattgggtcgacgccgcgattctcaaaacgcgccagcgtgtcagcctggaaacgttcggcactgttttccagatcgccagtattcaccaacagcgtattggcagggaaataactgaacagtggcggcagcggttcgctgaagaatagcggctgccagtactcgatcccggcaggtaatgtgcctttactcacttgctgataaatatgttccgggtcgcgcttcacttcgaaggtatcacgccactggctgcggaacagttcaattgccgctttatcggtaggaaattcgtgcgcgggaagcagattgatctcttctacttcctccagcgtgcgctggctatcgacgtcaaacacccgcaggctgtcgatttcatcatcaaagaaatcaagacgataaggcagctcactccccatcgggaagagatccagcaacgcgccgcgcgtggcgtattcgccgtgctccatcacctggtcaacatggcgataaccggcgctgtccagttgggttcgtaatgcatctcgtgacaggcgctgaccttttttcatcaccagcgcatgaccgtggagaaagctgtgcgggcaaacgcgctgcataagcgtattcaccggaacaatcagtacgccacgctgcatggtcggtagctggtaaagggtggaaagacgcgaggagataatgtcctgatgaggcgaaaaactgtcgtaagggagggtttcccagtccgccagattcatcaccatctgatcggtgaactggctgatttcatcatgcaaacgcagagcattttgcatatctggtgcaatgagtaccaccggaccggcgtgacgttcggcaatttccgctaccagcgtcgcgcaggcagcgccggttaactcgcccagcagacgctgctcacccgctttgacgggcagcgtataacgatattgttcaggcataacggttgtcagattctcgttaggatatgcctcaacatatgagggcatatctctgataagcaatgctgttcattatccgtaatcggcatggtttagcaaattgaatcgccccggctggggcgatggcttagcgggagtaactgacggtagcgggcagagaaggcggggagaacaacagatcgctgaatgcgcgctgtgaaagttttcttaccagcaagcccgcaacagtacaaatcaacaaactgacaaaggggtaaatcagcaggagcgtcagttcgacttgcggcgaccagcgtaccgcgttcatttgcggaatcaggcttaagctgaatatttctaccagaatgcgatgggtggtatagatagcaatggtgttggagccaatcacattcagcaggctggaggaacgcataccgaaacgctgctcgtactgataaaatagcttcatgattaccacaatcgataccagcgacaacagcagcgagatattaaacaaccaggcaccgaccgccagaacggtcagcaaagaagccatcagcagatggcggcgcaacggtaccgctttaacacaggtcattaatgttgcgccaaaccatgcgccaaggctgtaataaggcaaattgcggatcacactgttcattccccaccacggtgtgggtacgaaattaacagccacactcatcagtacaaacagaacaaataacggcagggccaggcggttaaaaattttacatatcacgaaatagacaattaacgcatacagataccacaagctggtgctggcggtgatcatcccgtgcaggaactcaccggtggaatcggcataagcggcattggaggcattgcttaaatcgcgctcaggtgccagccactggttcagcgcacttaacgccagccactgcaccacgccccaaagcgccagcacccagaagatgttccagatgcgtttatcgagacaatttccccacggtacgctgtcgatatagcggcgaatcaaatagccagagataaagaaaaaaaccggcatacgaaagggtgcaaggtaaagattgaaatagatccagcatttgctcaggacttctgataacggatgctggaaagtggtcagatgcggataaaaggtaatgaccgagtgataaatcaccaccagacaaatacataaccctttgatctggttaatccatagctctttttgtttcatcaggacaacacgctctttttatttaacatgcggttgatcctgcggggcgagtcgcgtggtgtaatgcgtatctgtctgtatttggttatttttcagataaagatcaggccacatggccgatgataaaatgaggcactttagccgattgatttgccggtacttttcagattagccctgacgatcacttacagttcagacgtttacccatcctgctttcgcttatatactcgtgtctttgctacagcaaccagacggatttcatgtaccaacctgtcgctctatttattggcctgcgttacatgcgtgggcgtgcagcggatcgcttcggtcgtttcgtctcctggctttctaccatcggcattaccctcggggtgatggcgctggtcacagtattgtcagtgatgaacggctttgagcgcgagctgcaaaacaacatccttggcctgatgccacaggcaattctctcttctgagcatggctctcttaacccgcagcaactcccggaaacggccgtcaaactggacggcgttaatcgcgtcgcacctattactaccggtgatgtggtactgcaaagcgcgcgcagcgtggcggtcggggtgatgctgggtatcgacccggcgcaaaaagatccactaacgccgtatctggtcaatgtgaaacaaactgacctcgagccggggaaatataatgtcatcctcggtgaacagcttgcctcacagttgggcgtcaatcgcggtgatcaaatccgcgtgatggtgccatctgctagccagttcacgccgatggggcgtattccaagtcagcgcctgttcaatgtgattggcactttcgccgccaacagtgaagtcgatggctatgaaatgctggtgaatattgaggatgcctcgcgtctgatgcgttatccggcaggcaatattaccggctggcgtttgtggctggatgagccgctgaaagtcgactcattaagtcagcaaaaactgcctgaaggcagcaaatggcaggactggcgtgaccgtaaaggcgagctgttccaggccgtacgcatggaaaaaaatatgatgggcttgctgctgagcctgattgtcgccgttgcggcgtttaacattattacctcgctggggttaatggtgatggagaagcagggcgaagtggccattcttcagactcaggggctgactccgcgtcaaatcatgatggtctttatggtgcaaggggccagcgctgggattatcggtgcgatcctcggagcggcgcttggcgcactgcttgccagccagttgaataatctgatgccgataatcggcgtcctgcttgatggcgcggcgctgccggtcgctatcgagcctttacaggtcattgttattgcgctggtggcgatggctatcgcgctgctgtctacgctttacccttcctggcgcgctgccgccactcaacccgctgaggctttacgttatgaataagatcctgttgcaatgcgacaacctgtgcaaacgctatcaggaaggcagtgtgcaaaccgatgtactgcacaatgtcagtttcagcgtgggcgaaggtgaaatgatggcgatcgtcggcagctctggttccggtaaaagcaccttgctgcacctgttaggcgggctggatacgccaacctccggcgatgtgatctttaacggtcaaccgatgagcaaactgtcgtcggcggccaaagcggaactgcgcaaccagaagctgggatttatttatcagtttcaccacctgctgccggattttaccgccctggaaaacgtggctatgccgctgttgattggcaagaaaaagcccgctgaaatcaacagccgtgcgctggagatgttaaaagcggtggggctggagcatcgtgcgaatcaccgcccatctgaactttctggcggcgaacgccagcgtgtggcgattgcccgtgcgctggtcaataacccgcggctggtactggcggatgaacctactggtaacctcgatgcacgtaacgccgacagcatcttccagttgcttggggaattgaatcgcttgcagggcaccgccttcctggtggttactcacgacctgcaactggcgaaacgtatgagccgccaactggaaatgcgtgatggacgtctgacggcggaactgagcctgatgggggcggagtaatggcgatgcctttatcgttattgattggcctgcgttttagccgcggacggcgacgcggcggcatggtgtcgttgatctccgtcatttctaccattggcattgccctcggcgtggcggtattgatcgtcggcttaagcgcgatgaacggctttgaacgcgaactgaataaccgcattctggcggtagtaccgcacggtgaaattgaggcggtagatcagccgtggaccaactggcaggaagcactggataacgtgcagaaagtgccgggcattgccgccgctgcgccgtatatcaatttcaccgggctggtggagagcggcgcgaatctgcgcgcaatccaggtgaagggcgttaacccgcaacaggaacagcgtctgagcgcattaccctcgtttgttcagggggatgcctggcgcaattttaaagcgggcgaacagcaaattatcatcggcaaaggcgtggcggatgcgctgaaagtgaagcagggcgattgggtgtcgattatgatcccaaattcgaatcccgagcataaactgatgcagccaaaacgtgtgcgtttgcacattgccggtattttgcagttgagtggtcaactcgatcacagttttgccatgatcccgctggccgatgctcagcaatatcttgatatgggttccagcgtgtcaggtattgcccttaaaatgacggatgttttcaacgccaataagctggtacgcgatgcgggggaagtgaccaacagctatgtttatattaaaagctggattggtacttacggctatatgtatcgcgatatccagatgatccgcgccattatgtatctggcgatggtactggtgattggtgtggcctgtttcaacatcgtctccaccttagtgatggcggtgaaagacaagagtggcgatatcgcagtattaagaacgctgggggcgaaagatggtttaattcgcgccatctttgtctggtatggattgctggcagggctgttcggcagcctgtgtggtgtggttatcggcgtggtggtttcacttaaacttaccccgattattgagtggattgaaaagctgatcggtcatcagttcctctccagcgatatctattttattgacttcttgccatcggaattgcactggctggacgtcttctacgtactggtcacagcattgttgctgagtcttttggcaagttggtatccggcgcggcgcgccagtaatattgaccctgcgcgagtccttagcggccagtaaaggcagtacattaaaacaaggagcggcaatgtattacgggtttgatattggtggaacaaaaattgcgcttggcgtgtttgatagcggtcggcagttgcagtgggaaaagcgggtgccgacaccgcgtgacagctatgacgcatttttagatgcagtgtgtgagctggtagctgaagctgaccggcgttttggctgtaaaggttctgtcggcatcggtattccgggaatgccggaaacagaagatggtacgctgtatgccgccaatgtccctgctgccagcggtaaaccgctgcgtgccgacctgagcgcacgtcttgatcgcgatgtacgccttgataacgatgccaactgttttgccctttctgaagcatgggatgatgaatttactcaatatccactggtgatggggttgattctcggcaccggcgttggcggcgggctgattttcaacggtagaccaattaccggtaaaagctatattaccggcgagtttggccatatgcgtctgccggttgatgcgttaaccatgatggggctggatttcccgttacgccgctgcggctgtggtcagtatggctgcattgaaaattatctgtctggtcgcggttttgcgtggctgtatcaacactattatcatcaaccgttgcaggctcccgaaattattgcgctttatgatcaaggcgatgagcaggcaagggcgcacgttgagcgttatctggatttattagcggtttgtctgggaaatatcctgaccattgttgaccctgacctggtcgtcattggtggtggcttatcgaatttcccggcaatcacaacgcaactggcggaaaggttgcctcgtcatctcttacctgtagctcgtgttccgcgcattgaacgcgcgcgccacggtgatgcgggaggaatgcgtggtgcggccttcctacatctaaccgattaaacaacagaggttgctatgctgtcgcgtcggggtcatcggttaagtcgttttcgtaaaaataaacgccgcctgcgcgagcgtttgcgtcagcgtatttttttcagagataaagtggtgccggaagcaatggaaaaaccaagagtactcgtactgacaggggcagggatttctgcggaatcaggtattcgtacctttcgcgccgcagatggcctgtgggaagaacatcgggttgaagatgtggcaacgccggaaggttttgatcgcgatcctgaactggtgcaaacgttttataacgcccgtcgtcgacagttgcagcagccagaaattcagcctaacgctgcacatcttgcgctggcgaaactgcaagatgctctcggcgatcgctttttgctggtgacgcagaatatcgacaatctgcatgaacgcgcaggcaataccaatgtgattcatatgcatggggaactgctgaaagtacgttgttcgcaaagtggccaggtcctcgactggaccggagacgttacgccagaagataaatgccattgttgccagttcccggcacccttgcgcccgcacgtagtgtggtttggcgaaatgccactcggtatggatgaaatttatatggcgttgtcgatggccgatattttcattgccattggtacttcggggcatgtttatccggcggctgggtttgttcacgaagcgaaactgcatggcgcgcacaccgtggaactgaatcttgaaccgagtcaggttggtaatgaatttgccgagaaatattacggtccggcaagccaggtggtgccagagtttgttgaaaagttgctgaagggattataaagcgggaaaaattgcctgatgcgctacgcttgtcaggcctgtgaaggggcgcaattaattgaatttgcgggttttgtgggccggataaggcgttcgcgccgcatccggcataatacatgcgaactttactgcctcttttaccgtttactcgtccatagtaacgcggcaataaacgtacagacaccaatcagccctgcccagagtggcgatattctggtaatcgcaaagctgttatcgatatacaaacataaagcctgataccccatattggcaacagccatcgccactgcaaattttaacgcataataaaggcgcgttgtgtagttaaaaaatgcagcaaagacgatgaatgcaactgcccaggcaaaaaggcctaatgtcgtggtactgccgggtggatcattttcatgctgttgtccgggatgcggataatatgtcagtggtggcgtcggttgttttaatatctgtgcttgtaaaacagccaatgcattattgataccctgataccagagatccgcatgtaaataagccagcgtgtgattttctaccagaaggccgagatgtttatcgtccatactgctttcgacctggccgttggttatcataattaaccgtggctcgcgggtagtaaagagtaacagaacacttccttttacattactcattgaagatgccgcatgcgccagcatcgctttgccattttgcctgagactggcttcattattaatgtcgggtaaaaccacaataaacggtgcaactccggtttgttggcgaaaaagttcggctttatgcgcgatctcttcagcatctggtacagtaccggtaacatctgtaaaaagagtcttcattattggaattaagggcttactgattgccgtcagaggcaggaacatcagtaaactgagcagtatcatgatttttttcatgggcgggacttccgtttcctgcgtgtctttttagaggagggcatactgattaataaaccgacggagataaaaataacgcccataatgccgataaacccccatttaaaaaaattaacccacgggttatttatctcagccttttcaggatgtcctggagaataataaacattaactttatcgccttcgctgtcttcataaaaatcgctgccgatactcgaattgaaaattagcgtgtaatctggcgtcggtcgaaaggcaacgacgggataccacgaaccatttttacccgtgcgatgagaatgactggagtgccagacggtatcaacaatgacgccttcagtatgaatcgcgtctttgctataggtgaactggttataaaagataacaacagaaatgaggatcagtaccagaccgataccgaagaatatacgaaagaaaactctactgtcctggctcattagccacatccttgctaaataaaaaacgggcggtaataccaccgcccacttgctgaattaacgtcctgctttcagcttctgataatactcttcataaatgctgctggcggagcctacgtcattttgccattcaccatttttaatggtttcagcatccgggtagagcgttttatcgttcgccacttccggacttaacagcttacgcgccgcaaggtttggcgttggataaccgatagtttcagcaacctgttttgccacatccgggcgcagcaggaagttgatcaatttcagcgcgccttctttgtttttggcatttgccgggatcgccaggctgtccatccagaaaatgccgccttctttcggccataccacatcaattggcgtacccgcctggcgtgcaacgaaagcagaaccgttccagatcatgccgaggttaacttcgccttccatatacgggttagcggggttatcggagttaaacgccgcgacgtttggcatcagttttttcagctcgttgtatgcagcttcaatctctttcggatcggtggtgttaccggagtagcccagcttacgcagcgccatctggaacacttcacgggcatcgtcggtcagcagcaggctgcctttgtactcaggcttccacagatcggcccagctggtgacagatttcggatccaccgcatcaccgttaacgccaatcgccgttgcaccccagatatacggaatggaatagtcgttattcgggtcaaacggcttgttgagcatgtctggatcgaggttgctgaaattgcttaacttcgacttgtcgatcttctggatcatcccttctttacgcattttatcgacgtaataggttgaaggaaccaccaggtcataggcaccgtctttgtacgttttcagcttcgcgtacatggtttcgttcgactcgtaagtcgaatagataaccttaataccggtttctttggtgaactgttcaagcagtcctggcggcacgtactcggtccagttgtagaaatacagcgtgttgttgtcatcggcgtgagcggcgctcatgcccagtgccagagcacccgccgcgagcaggtggcgtgaccattttttcatttaacgtcccctgtgttacctttcgttttatcacgagcaataagctggctggcaattaccatcaccagcgacagcaccagtaatatggttgccagcgcgttaacttccggcgatacgccgactttgaccatcgaataaatttttaacggcagaatttcataactcggcccggtgacaaacgaagaaaccaccacgtcgtccatcgacagggtaaagcttaacacccagcccgccgctaccgctggcattgccagaggcagaatgatttttcgcagaatggtaaattcgctggcaccgagatctttcgccgcttccagcattcgcacgtcaaaacctttcaggcgcgaatacactgtcaccaccacaaatggcaggcagaaggtgatatgcgagaacagcagcgaccagaagccaagctgaatacccagcagcataaacagcaccagcagcgaaatcgccatcacgatatctggtgacatcatcaccacaaacagcattccgctaacgaacggcttaccacgaaagcgataacggtacagcgcaactgccgtcagtgaaccgataagcgtagcaaacgtcgccgaaaacaccgccattgttagtgaatgctgcgctgcctgtaacaggctgtcgttgttcatcagcaggctataccatttggtggtaaaaccctgccagttgatgccaaagcgcgagctgttaaaggagttcacaatcaaaataatgattgggatatacaggtacgcgtagatagcggtcataaaaccgccgcgaagcagtcgaccgatcattcgagttccaccttcttattcagcagacgagaagcgcgccagtaaaccagcaacatcaggcccattacgatagtcagcgtaatgctggtggctgcaccaaacggccagtcacgaatattgaggaactgtaccttgatgacgttaccgatcagcaggtttttcgcaccgcccatcaggtcggacacatagaacaggcccatcgctggcagcatcaccagcagacatccggcaataattcccggcatcgttagtgggataatgatgcggataaaggtctgcaacttgctggcaccgagatcgcgcgccgcctcaagcaacggcttatccagtttttcgatactggagtacagcggcatcaccataaacggcagcagaatgtaaaccagaccgataatcaccgcactaggcgtgaacatgatgcgaattggtgtatcgataacgcccagccagagcaaaaactcgttgagatagcctttggtgctgaggaaaattttcagcccgtaaatacgaatcaatgagttggtccagaacggaacaatcagcagaaacagcagcagcggacgcaccttgtgtggcagcttcgccagaaaccaggcaaaaggatagcccagcaccaggctggcgagggtggcgatcagcgccatattcagcgagtgcaatagcacttcaaaatagagcggatcgagcagacgcgtgtagttatccagcgtaaagaccattttgacgaaactggcgtcgtcgcgggtcaaaaagctggtgccaatgatcatcaggttgggcagaaagacaaacaacacaagccaaccgacaatagtgacaatcactacattctggaacttacttgtgttcttcatcagccagtacgacctcccagctttctacccaattaatggccattttttggtcgagagagtggtcaaagtcaggatcgtcttcattgaagaattcgctgaccatcaccatcttgccattttccagctcaacaaccgactccagcgtcatgcctttgtagttacgctcgcgaacgtaaccaatcagcccttcggcgtggttgtcgtcgttaatctcttcaacacgtaagtcttccgggcgcagcagaacatgcagtttttgccccggttcaacggcgaagttaacgtagatattacattcgcggccttcaacgttggcgagtacgcgctgctcgtcgagacgttcgatgacagtggcgttaaacatattgatttcgccaataaacccggcaacaaacaggtttttcggctcttcgtagatttcacgcggcgtgccgtcttgctcaatgcgaccatcgcgcatcaccacgatcctgtccgacatagtaagtgcttcttcctggtcgtgagttacgaacacgaatgtaatgccaagcttacgctgtaacgctttcagctcgttctgcatttgcttgcgcagtttgtaatccagcgctgagagcgactcatccagcaacaacagacgaggcttgttaaccaccgcgcgggcaatggcgacgcgttgctgttgaccaccagagagctgatgcggtttgcgttgagcgaaggtttccagctgcaccatccgcagggcttccatcacgcggggcgtaatttcagcagcgggggttttttgcatgcgcaacccaaaggccacattttcgaacacggtcatgtgggggaaaagtgcgtagctttggaaaacagtgttcacgtagcggttttccgccggaacgtgggtgatgtcctcgttatccaacatgatgcgtccggaatcaacagtttccagacctgcaatcaggcgaagaacggttgttttaccgcagccagaagggccaagcagcgtgaggaactcgccattgttgatagtcagatccagctggggaatgacctctttaccatcaaagcatttgcgaattcccgccaattgcaccagcggtgaaagcgaactcggttgtttattcaattttttactctgtcccatgtaaacgcaacggatggcttaccgatgcggggtttgtggttaaccaccttggtgactcttaatgagggcggtaattctacggcaaaccgcttgaatcgccaatctttgttgtgaattactggcttagctttatattcattaaggtaatgctgataaatattcccgcttgcaggggtaaaagtgacctgacgcaatatttgtcttttgttgcttcttaataatgttgtcacaaaaagtgagggtgactacatggataaactacttgagcgatttttgaactacgtgtctctggatacccaatcaaaagcaggggtgagacaggttcccagcacggaaggccaatggaagttattgcatctgctgaaagagcagctcgaagagatggggcttatcaatgtgaccttaagtgagaagggaactttgatggcgacgttaccggctaacgtccctggcgatatcccggcgattggctttatttctcatgtggatacctcaccggattgcagcggcaaaaatgtgaatccgcaaattgttgaaaactatcgcggtggcgatattgcgctgggtatcggcgatgaagttttatcaccggttatgttcccggtgctgcatcagctactgggtcagacgctgattaccaccgatggtaaaaccttgttaggtgccgatgacaaagcaggtattgcagaaatcatgaccgcgctggcggtattgcaacaaaaaaacattccgcatggtgatattcgcgtcgcctttaccccggatgaagaagtgggcaaaggggcgaagcattttgatgttgacgccttcgatgcccgctgggcttacaccgttgatggtggtggcgtcggcgaactggagtttgaaaacttcaacgccgcgtcggtcaatatcaaaattgtcggtaacaatgttcacccgggcacggcgaaaggagtaatggtaaatgcgctgtcgctggcggcacgtattcatgcggaagttccggcggatgaaagcccggaaatgacagaaggctatgaaggtttctatcacctggcgagcatgaaaggcactgttgaacgggccgatatgcactacatcatccgtgatttcgaccgtaaacagtttgaagcgcgtaaacgtaaaatgatggagatcgctaaaaaagtgggcaaagggttacatcctgattgctacattgaactggtgattgaagacagttactacaatatgcgcgagaaagtggttgagcatccgcatattctcgatatcgcccagcaggcgatgcgtgactgcgatattgaaccggaactgaaaccgatccgcggcggtaccgacggcgcgcagttgtcgtttatgggattaccgtgcccgaacctgttcactggcggttacaactatcatggtaagcatgagtttgtgactctggaaggtatggaaaaagcggtgcaggtgatcgtccgtattgccgagttgacggcgcaacggaagtaagcaaaaagggatgcggcatgtgatgccgcatccggcttaaatccaaacttacccttcgaagaaccagtatccgctattgaccagcgccgcgagcatcgcgaggaatgacggatcttccagcgcatcgccaaaattctccgcggtcagcgcaatgttgctggcgagtgcatccagtgccggacggtgcggggaatcgattttctcaccattggcatacacgtcgtcgccaatgcgcaatacgcgcagaccccccaggcgcaccagcacatcaccttgtttcagcgcatcgtagatttcatccggctgataaggcggctctggcggcgcgatatccagttcatgacgtgactgggatataaactcgccaaaccattgcttaaagtgttccggctggttgatcaattcgagcatcatctcacgcagtttatccatctcttgcggcagaacgtccgcaggatgagcgcgaggtggaacatcaggatcgctgtagtagttgccgcccagttcacgttgcagcacataatcggcaaatccgctaatcagttcccgcgtattcggcgcgcgaaaacccacggaatagttcatcgcattttccagcgcgtagccttcatgcgggaatcctggcggaatataaagaatatcgccaggctccagctcttcatcgatgatggcttcgaacggatcgacctgtaacagatccgggtgcgggcagtgctgtttcatttgcagcttttcacccactcgccagcgacgacgaccggtaccctgaatgataaacacgtcgtactgatcgagatgcgggccgacgccgccgcccggtacagaaaaagagatcatcagatcatcaatacgccagtccggtagttcacggaacggtcgcattagcgcagcggtcggctcatgccagtggttcactgcttgcactaacaatgaccagttagtttctccgagatgatcgtagctttcgaatggaccgtggctgacctgccatttgccatcctgatgactgaccagtcgactgtcgacttcgctttccatcgccagacccgccaactcgtctggagagattgggtcaataaaattattaaagccgcgttttaacaccaccgggcgtttctgccagtgacgttcaagaaaatcgggccagttaagagtgagttggtattccatgttaagcatccacaggctggtatctgcaaccgattataacggatgcttaacgtaatgcgtgaagtatagcacagcagcgaacgaggaaggattcgagccggacgtaatagaggcggcacttgcccacgtcgacaccaacgaagttagacgggcatacaaccggagcaactacatagaaaaacgcatcgtgctgatgcgctggtggggcgaatttgtcgaggctgcggcgacgggcgtaaccctcgccagtggtaaaaggggtatccgagccgtgtagctgtacagaaaaccagtaaaaactacgaaaaccatgtaaaaccgtcgtataattgcatcaaatttaacgacaaggccgtgaaacatgaaaccgttaagatgcaaaaaaatatcagatgcaattgcgacgggctgcaactggccctgatggttcagcatgaattttggtcaacctacgatccggaggacagaacgacggccccatcaaaaaaacaggtagtagattttctggtatcccgtggcgcttccagaaatctggcggtaagtattgataaggtcgtacgtccggcatctatgaagatcggaggcaggcccaaaaaatggcggtaacaatcctggaagcggcagaaatgccgctttttttataattccatttcaaatcatcaatataaaaacggtgtataccgtttaaaaacggtgggaactgtttttacccatatccgatgatttaccgtatttgtcaccggaatacaccggattcacaaggtaaatcacgatggaagcaatcagaaaaattatctttcgccaggaagtaaaaaaaattatccacatcaaggcagacagcacgctgcaaagcatgatcaacgccggagaatttccgcagggttttcgcgttggtttacgccgtcgcggatggtatgaggatgatgtgttggcctggcagaaagaacgcgaacaggaagcacgcggaacggctgcttaacgggtatcacagatatgacaaacacgaaaaaagcggccccgatatggagccgcctttctgaacaattaacccgctgcgccttatgtgtatatgatcccaaacataagcacggggatgatagccgctatcaggctggtgggcaatgcaatcagtctggttcagttcgttgccatacctgcaatgagcgcttttccctgtattctttaaggaattgctcaagggcaaaagcacatggcgcgaatctttctgattcatgctctatctttctgcgccgtcttttccgtgccggtgataatgttttggtcaattctttatcggtcattgtgttgtcctgcatagcaatgcgccgtaataccttacaccacggcgctgatggtgattactctggttctttggtcttgcggcgctggagttcttcacgtgcgacagtgacgagctgcccgatctcctcggcggctttgattccgagtttttccacctgcgccagtgcatcgtgcgaagaaatcagggggttttctccgcttccttctgcctggcggcgggcgatttcaccgcgcatggcggttactatgaatccggcgttgctttcaccgtccagttttacggattccatgccttcaataacatcatgcgggatccgagctgtcagtgattgtgattttgcgttttttgaacctgtagccatctgtaatcctctcaatgaaagtgtaagacaatatacacataaaaagtcttacataaaagcattgacatgtaagccacctataaataaagttacttacaccttgttaatgcaaggtgcagaaacgacgaaaccccgcactgtaggagcagtaacggggcttctaaccaccaacgatagcaagattatcgaggcagctatgagaaattataccatacacccgcaagggcgggactcgtacaacctgaataaatacatctggcgttttatcgccctgagcacggcacaaccgcgcgtgattaccatcgaggccaccagcgaacaggaagcgcgtcagcaatctccggctggctgcgtgatggtatttgctgcccgtattcgtcagggggtaggcttatgagccaggaaatcacactacaacaggcagcagaacgcgcccaccaaatcgaagttatttgcgcactggcagaggattaccctggcatgatgaccgacagcgaatcaggggcaatcatcggcttacttaaacgccttagcggtgaggtctgcgtattcctgagcgatgaacaggaaagaagaacgcttatttctaacgaaaaaaaatgcggaggggtacatgtgcaataaaaccacaccggacgcagcagccgccgcgctcactacgctgatgcacgcgcttatcgatattgaatgcactgcagagcttgcgcagggagaagaacagaaagaccggacacagttcgccctggaatgtatccgatacatcgcaacacggtcgctgaatgacgctaaaaatattcttgttgctgattgtgaaaatggggggggttatgcgtgatgatcgttttaattccctgaaacaggaattttccggcgttcctgatgatgcggctgatgcgctttcgtcaatgccagaacttattagagcggcttttttcttactttccacgagagaatataaatcaacggggcttgatgtactgaatatcgccgccgattatgctgatttcgtgacagaggttattttaagaaaaacgacggacggggattaatatgcgtgatatttaccacgaaacaatagaccgcgcatttcttgcactttctcacagtgaaaacatgctggaaatattgcgcatatggcttgaaacacttggcgacaatgaacgcgacaaacaaaaatcaagaattgccacggcattaataacgcttcttgagcctgtaataatggaactgcaagaaatagatctattgcacgatagatataaagaacagcacaccggagaataaaaataatgaaacttaaatattctggcttaactgccagtggcaacactcaccctaaatttacgcgcggcgatatttaccgcgaccagtacggcggcacggtaatgattaagggcgtggcgggacggtgcgtaacttaccgccgtgaaggttacgaatatgattgcgtgatgcctgtttatcagttccggcgtgatttttctctggtacagaccgcgccgcataacgtgcccaccagcaacgccagggcacgggcaaacatccagaagctgaaaaccatgattaacggattcaggggtaaaaaatgaaactggcaccgaacgtaaaacagcagtcacgcggcataaaacacaaaggaacagaagtcattatttttgcgggtagtgatgcctgggcacacgcgaaacaatggcaggaacatgatgcgcgtatggccggagataatgagcctcctgtgtggcttggggagcagcagttatcagaactggataagctgcaaattgtgccggaaggcagaaaatccgtgcgcatattcagggccggatatcttgcgccagtaatgataaaggcgattggtcagaagctggcggcggcaggcgtacaggatgcaaatttttaccctgatggtatgcacggtcagaaggtggagaactggcgcgaatatctggcccgtgagcgccagaatctttctgatggtctggtcattgagcttccggtaaagcaaaaggcgcaactttcgcagatggcggacagtgagcgcgcgcagctgcttgccgatcgctttgatggcgtttgcgtacatcctgaaagtgaaatcgttcacgtatggcgcggcggggtatggtgtccggtcagcacaatggaacttagccgcgaaatggtggcgatctattcagagcacagggccactttcagcaagcgcgtaatcaataacgccgtggaagcgttaaaagttattgccgaaccaatgggcgagccgtccggcgatttgctgccgttcgccaatggtgcgcttgacctgaaaacgggggaattttccccgcacacgccggagaactggatcaccacgcacaacggcattgagtacacgccaccagcaccaggggagaacatccgcgataacgcgccaaactttcataaatggcttgagcacgcagccggaaaagacccgcgcaagatgatgcgtatatgtgccgcgctgtacatgattatggcgaaccggtacgactggcagatgtttattgaggccaccggagacggcgggagcggtaaaagtacattcacacacatagccagccttctggcagggaaacaaaacacggtaagcgctgaaatgacatcgcttgatgatgctggtgggcgtgcgcaggttgtcgggagtcgtcttatcgtcctggcagaccagccgaaatatacaggcgaaggaacgggcatcaagaaaatcacgggcggcgaccccgtggaaattaacccgaaatatgaaaagcgttttacggcggtaatcagggcggtggtgctggcaaccaataacaatccgatgatattcaccgaacgggccggaggtgtggcacgtcgtcgggtgatattccggttcgataacatcgtaagcgaggcagaaaaagacagggagctaccggaaaagatcgcggctgaaatccctgtcattatccgccgcttgctggcgaactttgccgaccctgaaaaggcacgggctttactcattgaacagcgtgacggtgatgaagcactggcaataaagcaacagacggatccggttattgagttttgccagttcctgaattttctggaggaagcacgcggcctgatgatgggcggcggtggcgattcagtgaagtacacgaccagaaacagcctttaccgcgtctatctggcgtttatggcgtacgcaggcaggagcaaaccgctaaacgtaaatgactttggcaaggctatgaagccagccgcgaaagtttacggacatgaatatattacgcggaaagttaaaggagtaacgcagactaacgcaataacaacagacgattgcgacgcgtttttataatttgttgcaatggctgtctaccctgtctacctgagtaaagaaaaatacatttaattcagtgcattaagttaggtagatagcctttttttactgtctacccactatctaccctctctacctgattttacctgaatcagacagggaggtagacacggggtagatagtggataaaagcactctaccccgctgaaagccgcgccattactggcatgagggccactaaggtagataggtagacaaggggaggcacaactcaaaactttttaaacgagggggtaaaaataaatatgcacacttcagggaaatttaataaatcactcaaaaaacgcagagacagaacagaaccgaaatatcgcgcgttagacatgacagagcacgctttaaaggtggcaatcagaacgatagaccgacacgtaggggaaggatacgcgaaggaacatcccgacctgataagcgcattcatgaccacagcagcggcaaactttgccacgctgacagaacgggagattgccgaagcggaacaggtaacaaccatcaacgttaaaaccggagaggtggaatcatgacagcacagatagccgcttacgggcggctggtggacgacccgcaggtaaaacagaccagcaagggcacaccgatgacgctggcgcgtatggcggtcccccttccgtgcagccaggcagatgacggaacggcgacgatgtggttatccgtcctggcatttggcagacaggccgaagcactggaaaggcaccgcaagggtgaactcctgagcgtggcgggtaacatgcagatcagccagtggactgggcagaacggagaaacgcggcagggctggcaggttatcgcagacagtgtaatcagtgcgcgaacggcgcgactgggcggcaaaaaaggtcaacagggccaggctactgacgcgctgaacagggcaaaacaacaggcggggaatgatgatccgtacggggataacataccgttttaagcgacgagtgacagaagccggagcaatccggcttttttacgggtcctcctggcggggtgggcctgaacacggggcgggaggcgcggaaaaaagcgcatttttgtgattttatcgtcatcatcatcatgagcgtaatttattgtttttaattgttttgatgcaaaaaagatgatggttgtggttaattttcgttcgacatctttgcaggcagataaaaaagcccgataaggtcagaggtggcttatcgggcttttgcatatgaggctttttggtgcactgacacacatgatcgggataatcatttcataatttgcaacgcaactcaacatcattgcacaaaatgcaatcatgattataatcagagctggatgaacatccagttatgattttttaagtcaaagaggaatttcttactatggctgaagagaaaaaaggcggtgtttcggtgtacataagccccgacatcgtgaaggcgctcaaggaacgccaccagcagaacgtaaaagcaggcattgcggcaggacttgatccgctggcgatggttgagccgtcaacaggctggcaggtacgctcctatttacgcgcggcgctgggcataaatcagactcatgggggtgaataatggcagtcaaagcaatggcacttaacacacaccagcttttcgcgtacctgaatcgcgaggatattgcggaatttaaatttagtccgctgtttaccgcgctgtttttcccgaacgtggcgacattcaacacgcaaaacatcatgctggataccctggacattgaagaagtcaccatgtcggcgttttgttcgcctatggtgggtagccaggttcagcgcgataaagggtacgaaaccagcacgattaaacctggctacatgaagccaaagcacgaaatcgatccaacgaaaaccatcatgcgcatggctggagaagatccggcacagcttaacgaccctacctatcgccgtatgcgcctgattactggcaatatgcgccgccagataaacgccataaaagcgcgcgtggaatggctggcggtaaatgcggtaacgaccggaaaaaacatcattgagggcgaaggcatagagcgctatgaaatcgactggaagataccggaaaaaaacatcatagagcaggccgacgggaaaaaatggtcagagcaggacaaagaaacccacgatccaatctatgatatcgaactatacgccgatcaggctggttgccccgcaaacgtcatgattatgggcgttgaggtatggcgaacgttacgcagctttaaaaaattccgtgagctgtacgatctttcccgtggttcagagtccgccgcagagctggcctgtaaaaacctgggcgaagtggtgagctttaaaggctatctgggcgatattgcccttatcgtctattccggcaaatacactgacagcgacggcacagaaaaatatttccttgatcctgatttgctggtcctgggcaacaccaacaacaaagggctggtggcctatggtgcgattatggatcaggaagcggtaagaacaggcgcaacgcaaaacatgtactacccgaaaaactggattgaggacggcgatccggcgattgagtacgtgcagacgcacagcgcaccgcagccggttccggcagatattcgcaaatttgttaccgtcaaaattgcttaacgggggattctatggacactccatacattgagttatttgcaggcagtcagcaggtatccacgacgctggtacattttgccgctgatgctggcgttattcaggaatttaccccgctgatgctggcggacaatggcgagtttaagccgtgggatggtcaggaatctggcaaggctgtttatctgacttcgtacctcgtggacacgtcaaagcagaaatcagcacagtgttacaagacggggatattcaatattgccgccgttaactggcctgagagcgtcgacaccgatgcgaaaaaatgcgccgcctttgcgggttctggcgtatccgttcagccgctggcccgataagcagggggaacgatggcaacgaatgaaagcatcatggcgctaccgctggcgagtaaatttaaagccgaagcgcgggcaatggctgacagaggtttatcaacctacgaggccgtatatcaactcaacaaactggaagagcaggacaagccgcgcgctgatgcgattatggcgcttcatgagcataaagactatcagccgctgttgcgtgcaatggcaaacgtgccttgtatcgatgttgatacggctaaaaacatcctgaacatgaccatagagcaggaacgcccgaaggttgcaccagagcttaccgcagcctttgaaaactttatggacatgcacagcccacaaaccgtatcagctggcatggcatacgatggcagaaacccaggcgatgacggcgacatcgatcgcatactgaaaaccatctgagacaaggccggagaaatccggcttttttgcgggtccttcctggaattatggcccgttacggggcggcgacctcgcggtttttcgctatttatgagctttttcaggggggtggtggtggttttgttgtttgctctatctttatgaatgaaaagggaaagatgcaaacaatacaccaacctgaagcagtaattaagttggtgtattaatgaaatcgcacctgatgaacaaaaaaaacatggcgaaaagctgccgtgtaagtgcgacagcgttcgacaagtggggagtgactcccgttgaacgtaaaggccgtgaggcgttttacgatgttgccagcgtgatagacaatagggttaacaatgcaattagccagcttacaaacgacaaaggcgatattgatgatgatgaactcttacgagtcaggatcagattactgacagcacaggcggaggcgcaggaacttaaaaacgagcgcgatcgcggtgacgtgattgatactgagttttgcctgtacgcgctttcaaagctggcgagtcagatttcatcaatcatggacagcctcccgcttactatgcaaaggagcttcccacagattacccccgccatgctggataggcttaaaagggaagtggttaaagcctgtaatgccagtgccagagttgccgacaacctcccacagatactggctgattacttgaaagaaacaaccggaaacgtaccggaaaagttgctacagaagaaaggcgagtaacagacgcgcaattattgaacaaaactgagaaacgacatgaaagcgtcataaatcgccattttagatgattaccgtgtcgtttctttttattgtgtatctatttaaaaacaaatagttatgttcgagaagtaccgacatgctttttccagaaaaattttcataaacagataaaaaccgcgaggtcgccgccccgtaacgggtccataattccaggaaggacccgacgacaccagacaatcagaacgatgggtgcacaatgacagaagccgaaatactgggattaatccgccgtgctggtggaatcagccagcagactgacgaacaggccacgcagccggacagcgtgacagccgaaaattatgcgcgtgttgttgctgaggtgatgcgccgtgatggtatccagcttaatgatgtggatatgcgcaacatacggatccgcgttcttgaaatgctggcctacaatcgccgcgtggcactgtatcgggaaacggagaaaattacataccactggaagaagccggagcggttgcggcggtaactggttgatattttcgaaattcgccagcggcgaacatcggggaaaccagcctaacccgttgatattttcgggaacctcaaattgaggaggtcggaaacataacccgtcatattctggatgctgataattaccacgcagcccattaaggcctaacccgttgattctttcggacatatttattcatctttcggtgcagaatgctggcgaccaaaaatcacttccatccgcgcaccgcccagcatgctctctccggcgacgattttaccctcatattgctcggtgatttcgcgggctaccgccagccccacaccttgcccagggcgtaaagtatcaacccgttgaccacggtcgaaaatgacctctcgcttgcttaatggaataccggggccatcatcctcgaccacaatatagagatgctcgtcggtttgccttgcagaaatttcgacaaattcgaggcaatatttacaggcattatccagcacattacccatcacctcgacaaaatcgttctgctcaccaacaaagctgatctctggcgaaatatcgagagagatattgacccctttgcgttgatacactttgttcagcgccgaggtgagattgtccaacagtggggcgaccggatgcagctcgcggctaagcaatgtcccgccgcgcatactggcacgatgcaggtagtagccaatttgctgtgaaatgcggctgatttgctccagcattaccggctcagcatcactgacgctcatcttctcactacgcagagaacgcagcgtactttgcagcaccgccagtggcgttttcagactatgggtcaggtcggtgagcgtcgtacgatatttgtcgtaacgttcgcgttcactttttaacagtcggttcaggtttcgtaccagactggtcagttctcgcgttgtggctggattgagcaattcacggttatgttcttccagttcgcggacttcttttgccagggcttcgatggggcgtaaactccaccaggcggcgacccacagcagcgggatcactaacagcagattggctgagagcacatagataaaccagctccagaccatataggaactttttagctccaccggaatggtatccaccaccacaatggttaactttggcatccgcgatgttgccgggtagacgtttaccgccaccgagtgggtcatctccgcgtcgtcatcatcttcccgcacttcctgcaactgttgctgtatcgaatgatctccactcagcaagaggctggtatcgttaacatccgcttcaatttcatgaaaaccattcgatttcagccagtcaggctggatcatcttcatcagccagggcacgtcacgttgcgcccataaaagctgcccgttctcatcataaattagtgtcatcgtggggctttgcttgtcgatattttcgggtaactcgacatgcaacttattgttttcccacttcgcaagggtatagaacagattgctctcgccacgtaacagccgaaacgtggttttatcgaaactgacgctataaccgatcagcgcaaccattccgtaggcaagcgaaagcaccaatactactgctgccgttgctaacagaaaacgtacccgcagcgagagcgggaaaaaaagatgcagtaattttttcatcagcgcaattcgaacagatagccctggccgcgaacggtggtaatcacttcttgcggatattgtgcctgtatttttttgcgcagacgtcccatcagtacatctatggtatgactttcccgcagctccgcatccggatagagttggagcattaacgaatctttgctcaccactttgccattattgcgtatcaacgtttccataatggtgtattcgaacgcggtcagtttgatcacttcgtcattaatagataattcacggcgggagagatcaacctgaaacgggggtagcgaaatgacctgtgaagccagaccgctattacgccgcattaatgcctgcattcgcgccatcacctcttcaatatgaaacggtttagtcacgtaatcatcagcaccggcacttaatacttcgactttgtcctgccagctttcacgggcggttaataccagaatcggcagtgaaacatcattgctacgccagcggcgaatcagtgacagaccgtcctcgtcaggcaaaccgagatcgacaatcgcaatatccggtaaatgttcattgagataataatcggcttctttggcatcttctgcatcatcgacctgatgaccagcatcctgaatctgaactttaaggtggtgacgtaacaacgcattgtcttcaacaaccagtacgcgcatttttatttctccctgtcttaattattaaaatagtgtaacgcgattatgtggttatgggggtaaacattaaataaaccagcgggggaggggaggtaaagtgaaaaaataaaaagcggataatcttaataagcaggccggacagcatcgccatccggcactgttttgaggcttatttcagctcatcaaccatggtgatggcgcgaccaatgtagttagccggcgtcatcgctttcaggcgggctttctcttcttctggcaacgccagaccatcgataaactgcttcatgccttcggcgtcaacgcgcttaccgcgagtcagctctttcagcttctcgtacggtttttcgatgccatagcgacgcataactgtctggattggttcagccagcacttcccagttgtgatccagttcatccagtagatggtcacggttcacttccagtttactcacgcctttcagggtggattgatacgcaatcagcgcataaccgatacccacgccgaggttacgcagcacggtggagtcggtcaggtcacgctgccagcgggaaactggcagtttgcttgccaggtgctgcaataccgcgttggaaagccccaggttcccttcggagttttcgaagtcgatcgggttaactttatgcggcatggtggaagaaccaatctcaccagcaatggttttctgtttgaagtggttaagggcgatataaccccagacgtcacggtcaaagtcgatcagaatggtgttgaagcgcgcaacgcaatcaaacagttcggcaatgtagtcgtgcggttcgatctgggtggtgtacgggttccactgaatacccagcgaggtgacgaactcttcgctgaactgatgccagtcaacttccgggtaagcggcgatgtgggcgttgtagttaccgacagcgccgttgattttgccgaggatctccacctggttaagctggcggtactggcgctccatacggtaggcgacgttagccatctctttaccaatggttgacggcgtggctggctgaccgtgggtacgggacagcagcgggatatcgcggtactgaacggcgagatctttaataccatcaatcagttgacgccagtacggcaggatcacttcatcacgcgcggttttcagcattaatgcgtgagagaggttattgatatcttccgaagtacaggcaaagtggatgaattcagaaaccgcatgcagttccgggatctccgccactttttctttcaggaaatactcaaccgctttaacgtcgtggttagtggtacgctcgatggttttgatgcgtgctgcatcttcttcgctgaaactggcgacaattgcatcaaggtaaccgattgcgtcggcagcaaaagcaggaacttccttgatcgctgcgtgcgcggccagtttttgcagccaacgtacttcaacttgtacacggaatttcagcaaaccatattcgctgaaaatcccgcgcagcgcgctgactttatcgccgtagcgtccatcgacaggggaaacggcggtcagtgaggataattccatagatcacaactccggggttaaatgagcaagaatttgttttgcctgagtggtcaggcgattacgagaaaacatcagttgcagacgtccgccgccgacctggtgccagagcacggcggcgcgaatgcctgccagcagggtagcgcgaactttcgcctgcacttgtgggctttgcagtacagcaggggaaccggtgacctgaatgcgcgggccaagcgggctaatcacatcaacatagatagcagccatcgcgctcatcagcgtttcggactgtaaatcgaagtgttcgagctggcgttgcaggccgttgatccggttgcccagagtgtcgagcgcacctttcgctgaggagagtttgcgctcaagcaccatcagactgagtgtgtagcgggttaattcggcgtttaagccctggcgactgctggcattgagtacgccgagcaaggtttccagcccgacgcgcaggttggcttcgctaccgccaaaaaccgccagcgttgagctggggttcatatcgataatactgttgagtgagacgtgtagcgcatcgccatcacaatgcccctggtgagcgagttgttgcaccaggcgtgccgactgacaaataccggcaagggcgagggtgatgtcatagtaattctttgccacgttcactgcttccttgttttaagtaaagataataatcagaccggcagcggcagacgctgctcaataataccgccaccgaggcacacttcaccgttatagaaaacggcagactggcccggcgtcacggcggcaaccggctcatcgaaaatcacttcaatgcgatcagcgtccagcgccttgacggtgcacgggatgtcggtctggcgatagcgggtttttactgtgcaacgcatagtaccggtgaacggctcgcgatcgacccagtgcagctgctgggcaatcagaccgacagacatcagacgcgggtgttcatggccttgcgcaacaatcagaatgttgttttcgacgtctttatcgaccacataccacggttcttcggtgccgtctttggtgccaccgatacccagacctttacgctgaccgagggtgtgatacatcagcccctggtgctcaccaatttcatcgccatcgacggtaatgattttgcccggttgcgccgggagataacggcccaggaacttgcggaatttacgctcgccgataaagcagataccggtagagtcttttttcttcgcggtgaccagaccgagatcttcagcaatcttacgcacctgcggtttttccagttcgccgaccgggaacaggctttgcgcaatttgctcatggctgagcgtataaaggaagtagctctggtctttattgctgtccaggccacgcagcaggcggctcttgccatcgacatctgcccgacgtacgtaatgaccggtagcgatataatcggcacctaaatcttcggcggcaaattcgaggaaagctttaaatttgatctctttgttgcacagaatatccggatttggcgtgcgaccggctttatattcggcaaggaacagttcgaagacgttgtcccagtactcggcagcaaagttaacggtgtgcagttcaatgccaagcttgtcgcagacagcctgggcatcagccagatccgctgccgctgtgcaatattcctcaccgtcgtcttcttcccagttcttcataaacaggccttcgacctgatatccctgttgttgcaacagccaggcagaaacggaggaatcgacaccgccggacatgccgacgattactttttttgcggtttcagacattggatcactcacgacattgaacttcaaggcggcgtattctatcacgcagccttttagatgacaccctttgtaaaaggccagttaaaatcgccaatcatctccagcggatagcgttgcccgctttgataacaacgaatactttccgccaccagcggcgaacgaagatttgacgcctgtaaaatttcttcggcgctgacccaacggcagcagtcgatatcgctgtcatgaggctgcgtcgggcatatttgctcaagctcaatggcaaagaggaaacgcaaaaacggcgttttatccggcgcaatccactgatgcatacgaataaagtgttgcggctgcgcgctgatgccggtttcttcccacagctcacgggcggcggcttccactaaggtttcatcggcttccaggtgcccggcaggttggttccataacgctttaccattaatcgtctcttcaacgactaaaaatttgccttctgcgtgcaccacgcaggcaacggtaacgtgcggtttaaacattttgcatccttaatctgtcgcgtctcgccattcgccattggcaagattatccaaagagtaatcccccatcgcatagcgaatcagtcgcagcgtggggaaaccaacatgggcggtcatgcggcgcacctggcgattacgtccttcatataaggtgatcttcagccagctggtgggaatacttttgcgctcacgaattggtggattccgcggccataaccacgcgggttcttcaaccagctccgcgcctgcgggcagggtagggccatcatttaaggttacgccattgcgcaaggcttcaagtgcgtcttgtgtgggaataccttccacctgcacataatagatttttccggtgcgtttacccggctgggttaaacgcgcctgcaacgcgccgttattggtcagcaccagtaacccttcgctgtcgcggtcgagacgacctgccgcatacaccccctgaaccgggatgaattcttttaatgttttgcgtccggcttcatcggtgaactgcggaagaacatcgtagggtttattgaacaggatcacacgcgtgggctggttttcaggtttacgcctggtagaacgttgcgagctgaatcgcttaacctggtgatttctaaaagaagttttttgcatggtattttcagagattatgaattgccgcattatagcctaataacgcgcatctttcatgacggcaaacaatagggtagtattgacaagccaattacaaatcattaacaaaaaattgctctaaagcatccgtatcgcaggacgcaaacgcatatgcaacgtggtggtagacgagcaaaccagtagcgctcgaaggagaggtgaatggaaagtaaagtagttgttccggcacaaggcaagaagatcaccctgcaaaacggcaaactcaacgttcctgaaaatccgattatcccttacattgaaggtgatggaatcggtgtagatgtaaccccagccatgctgaaagtggtcgacgctgcagtcgagaaagcctataaaggcgagcgtaaaatctcctggatggaaatttacaccggtgaaaaatccacacaggtttatggtcaggacgtctggttgcctgctgaaacccttgatctgattcgtgaatatcgcgttgccattaaaggcccgctgaccactccggttggtggcggtattcgctctctgaacgttgccctgcgccaggaactggatctctacatctgcctgcgtccggtacgttactatcagggcactccaagcccggttaaacaccctgaactgaccgatatggttatcttccgtgaaaactcggaagacatttatgcgggtatcgaatggaaagcagactctgccgacgctgagaaagtgattaaattcctgcgtgaagagatgggcgtgaagaaaattcgcttcccggaacattgcggtatcggtattaagccgtgttcggaagaaggcaccaaacgtctggttcgtgcagcgatcgaatacgcaattgctaacgatcgtgactctgtgaccctggtgcacaaaggcaacatcatgaagttcaccgaaggcgcgtttaaagactggggctaccaactggcgcgtgaagaatttggcggtgaactgatcgacggcggcccgtggctgaaagttaaaaacccgaataccggcaaagagatcgtcattaaagacgtgattgctgatgcattcctgcaacagatcctgctgcgtccggctgaatatgatgttatcgcctgtatgaacctgaacggtgactacatttctgacgccctggcagcgcaggttggtggtatcggtatcgcccctggcgcaaacatcggtgacgaatgcgccctgtttgaagccacccacggtactgcgccgaaatatgccggacaggacaaagtaaacccaggctctattattctctccgctgagatgatgctgcgccatatgggctggactgaagccgcagacctgattgttaaaggtatggaaggcgcaatcaatgcgaagaccgtaacctatgacttcgaacgtctgatggaaggcgctaagctgctgaaatgttcagagtttggtgatgcgatcatcaagaatatgtaatcactacatgtgttaaatattgtaacgggcgtataacacgcccgttgttttatgatgatgtaaaatcttccccaaaactttccccaaaacccttccccaaaactggctattttctatgctgttttgatatctacgataatccagtctttaccacgatcatcattgtatcggtcggtcatttttctggatttatgacctaacaacttttgcgtatccagaccctgttcccgatataaccgttctgacagagatcgctgctcatgaaatgtgggcgcagttcctggctcccattttatgccacatttttccctggcctttttaaaagccgttgtaagagtatttgcagacacctggtctcctctgtttgcttgagaggtagtgtgacggtaatggaccagatatttactaacaacagcatccctgcactgagatataacttcacgaagggtaatattcagagcatcgcatttcaggttaagcggaatagcaagttttgaaccggttttttcctgagtaatgtgcaacatgtcgtcccagatattgaagtggtcaacaaaaactggccaccgagttagagttttttccagtatcgattttccgattcgtttggtggtaacccaccattatattcgtgcggtcttagtgcgctgtaatatccaacgatatagtccgttattgcgtgagctgcatcgctgaagcttacatagcccgtcgccggcacccattcgttcttcagactcctgaagaagcgctccattgggctgttatcccagcagtttccacgccgactcatactctgcctgatccggtatctccacagtaactgccggaactgcctgctcgtataatgactgccttgatcgctgtggaacatcaccccgacgggcttaccacgggtttcccatgccatttccagtgctttcatggtaagcctgctgtccggcgagaacgacatggcccagcccactggttttcttgcgaacaggtcgagaacaacggcgaggtacgcccagcgcttacccgtccagatataggtcacatcaccgcaccacacctgatttggctcggtcacggcgaactgccgttcaaggtagttagggatagcaacatgttcatgaccaccacgtttataccggtaagtcggctgctgacagctgaccagccccagctctttcatgagtctgccagcaagccagcgccccatctggtagcctctctgggttgccattgtggcgatgcttcttgctccggcagagccgtggctgatgccatgcagttcaagtacctggctgcgtaatacagcccgtctgccgtctggcttttcaggacggtttttccagtatttgtagctgctgcgatggaccccgaacacatggcagagagtggccacaggataacgcgccctgagtttcccgattatcgagaactgttcagggagtctgacatcaagagcgcggtagccttttttaatatttcattttccatttcaatacgttgtagctttttcctgagctcacggatttcaatttgttccggggtaataggggaggcttttggtgtttttccctgccgctcatcacgtaattgtttcacccatcgcgtcattgtggaaaggccgacatccatagcgctggctgcatctgccacggtgtaattctggtcaacgaccagttgagcggattcgcgtttaaactctgcgctgaaatttctttttttcattatggcacctgtgttgttctgaggtgagcatatcacctctgttcaggtggccaaattcagtaaaccacttcacagagagcaaaagagaaacgccgatgaacaactcatggtggcaggaactaatgcattttttcctgcaaggaatgacacttaaacagttgattcatatgctaatcatcctgatcatattgattattgttatgccggtaagcgtaaaagaatggataaacctgcatagtccagaaatccttcctcattactggatgtattacatcctgttgttttgcgttagctatgtgcttaacggcgttgttaattccgcttatcacgctgtgactgaaagaattgaggtattcgctgctcagaagcgcaaatctaaagaagaaaaatatgtgcaagatttgtttgattcgttaactcttggagaaagagcgtatttggcattcgctgtagccgctaataaccagctacaaacggaaaagggcgctcatgaatcaatttcattgctcaaaaaaggactcctcgttcgaaggcctcctgctgttggatatcctgataccgaccgtttcgttatccctgaaagctatagacatgagtgctacattaggtttgccgggaaggcagacagccttatggatgaacttatcgctcaggataagcatggcaaaaacaagtaattagcaaatgaatttatcatctcgccgtcagttgttttgatttccggtagcctgccgcgtaaagagctacgttcggaagacaagttgaaccttcatattttctggtcaacgttgtcagagttatcacttctgctctcattgctggtttgagcttgcattgcaagaccactcgtgaaggggttggcctgtgtagcttgtcggagctgatcgcctcctgactttgcagatttgcgcgacgagctctacggcgagaagctgcggtgcctttaaattctgtttttctggacatggattcctcccgaataaactttggcgatgcaatctcgaagctcctcctgagacggttgcttcggcattgcatcccacagcttatgtggttgggtgatctggcttttcagccacgtagtcgagagtcgacgttgtttaaagagcctgccagtctgttccatttggcttccagcgtcctgctgacggttaaatagtacgatatgtactttacaagatcaatacaatttgttgtaagttggcgtggttttttataacgctttgtatttaatagtgttgttttttagcgtggatgtattgcctcggcgatgtaaggagagatcagaattgcgtggtttagtgggttgcatctatttatttttcaataaatataattggttatgtgtttttaggtgggcgaacgtgaggcaaagaaaacccggcgctgaggccgggttgtattatgctgcaagtctcttaacccaagtctctcttttggagaatggtagaacttggcttgattcatggaagagtaaggagagttgttgcatttgatcaccaattgcttcgctgtctataacaacaaatctgttgttatactcctcacttgaagctttaagatcaattagtttcccaagcaatgagtaagcactattccagcttcctccgtgtttcacgcttgatgtaaaaacgtatttaggtatgtcggtttttattgttacagggacggtaatttgatgtccactcaagccatatacgttttcacgaagagaaagtgcgtctctaagctctgtgtgatatagataatcaataaccatactttcaaacttttcagcttgaactggctgataccagtctaacgacaaagttgatgcgagtataccagctctaattatgttcgatgtaatcgcaccgacatccttttctgttgcccaagcaatgatttctcctcgagcattgagttctgcgccttctttaagcagtaattgtcgtatctcatcaagtcgttttttggtaagcgagatccctcttgcctccatattcattaaggcatcgcatctgtcactaactaaatacctaccattgacttcacggataaaggcaccgacatgctctccatcatcacagtaagtgaatggactgataattctcaaggtcttgcctattggatggcattcgaaacctagttgtgagatcactgttgagcacatcatattccaaaccccatttgccccgactcatcttcaagcggtaaaggtattctcccagagtaagttatgttcagatgtttacagaagtaattccaataccctaccaggtcatctgggtttatgtcatcttcgattggaaacgctattctatcactatagtatccagcttcttcatagtatacatggtagtgagcaccgtaaatgatatcttggtacttcggatgatcgaccttgtaactattcgtgtgtttgtcaaagtgataggtatctaccgcgaaaaccctcttgttatgatagaaagcaataatatttattttagggtaagaaatcgggtcatcaggttctgaatcctgatctggtttccatttcagttcaaactttagcccttgtataggtatacaatcctcatccaaggggatgatatgggcttgtagccacatatcagagcgacttggtttctgtttccatttaacgccagaaaagttaactatttttttacaataaagtactttatcaacttctacttggcttggctgataatcatctatttttgccaatgtttaccgccctgtaaattgtagataaaagtggtttcatcacccaaacgtctcttcaggccattggctggcgataactttccccacaacggaacaactctcattgcatgggatcattgggtattgtgggtttagtggctgtagaaacacctgaccgctatccctgatcagtttcttgaaggtaaattcatcaccaccaagtctggctatgcagaaatcgccgggctcaacagcttgctcagggtcaaccagaattaacatcccgtcaggaaagctgggtttggaacctgttggtgcggtcattgagttaccttcaacctcaagccagaatgcagagtcactggcttttttggttgtgcttaccaatctctccgcatcgcctttggtaaaggttctgagttctggagagaacatcccagcctgaacatgagaaaaaacagggtactcatattgttttttaactggggccgatgagtattcgccaacaggtgaaaatgtcccgtcgtggttgaatgatatgttatcaataccaaggtatttaaacaccacaccaatatcactaagagatggatgacgagatccgcgcaaccagtgtccaatcccaccctgcgtcatacctagctcttcggctaacttctcttgagttatgccgagctctttcattctggatctagccagttcataccatttcattttcatgtccttattattacgctctgtactggaaccatccatgcacaatgtgtatttttacttgtattcgcaaagtacatattgtatttttttattcgtgtttactatggagggcatatgagcaacctacgaaaatatcgagagtcactgaatatctctcaaacaacacttgctaaggcagttggatgcacacagggagctatcggacattgggaatctggtcgtcgcttcccagaccttaaaacatgccgtgctcttgttgcgtgcctaaacaagttaggcgcaaaagtcagtcttgatgacgtgttcccgccggaacacaaagccgcttaataagcggatccgctctttgtaacaacggacattcgtcctacgtcgctgaaaagcgagttccaagatatctgaccaactaaggccatatgcgtttccacgcatacctttcaactaactattcactattggaaatcttaagaaatggaaagaacaagttacagcaaactatcacagcgtgacgttgatcgcgcagaaacagatttacttatcaatctgtcagctattacccagcgcggtctggcaaagatgattggctgtcatgaatcgaagataagcagaacggactggagatttattgcttcggtcttgtgtgctttcggaatggcatcagacatcagtccgattagcagggcttttaagtatgcgcttgatggactcaccaataaaaaacgcccggcggcaaccgagcgttctgaacaaatccagatggaattctgaggtcattactggatcaatccacaggagtcattatgacaaatacagcaaaaatactcaacttctgcagaggtaactttgccaaacaggagcgtaatgtggcagatctcgatgatggttacgccagactatcaaatatgctgcttgaggcttattcaggcgcagatctgaccaagcgacagtttaaagtgctgcttgccattctgcgtaaaacctatggatggaataaaccaatggacagaatcaccgattctcaacttagcgagattacaaagttacccgtcaaacggtgcaatgaagccaagttagaactcgtcagaatgaatattatcaagcagcaaggcggcatgtttggaccaaataaaaacatctcagaatggtgtatccctcaaaacgagggaaaatcccctaaaacgagggataaaacatccctcaaattgggggattgctatccctcaaaacagggggacacaaaagacactattacaaaagaaaaaagaaaagattattcgtcagagaattctggcgaatcctctgaccagccagaaaacgacctttctgtggtgaaaccggatgctgcaattcagagcggcagcaagtgggggacagcagaagacctgaccgccgcagaatggatgtttgacatggtgaagaccatcgcgccatcagccagaaaaccgaattttgcagggtgggctaacgatatccgcctgatgcgtgaacgtgacggacgtaaccatcgcgacatgtgtgtactgttccgctgggcatgccaggacaacttctggtccggtaacgtgctgagcccggccaaactccgcgacaagtggacccagctcgaaatcaaccgtaacaagcaacaggcaggtgtgacagcctgcaaaccaaaactcgacctgacaaacactgactggatttacggggtggatttatgaaaaacatcgccgcacagatggttaattttgaccgtgagcagatgcgtcggatcgccaacaacatgccggaacagtacgacgaaaagccgcaggtacagcaggtagcgcagatcatcaacggtgtgttcagccagttactggcaactttcccggcgagtctggctaaccgtgaccagaacgaactgaacgaaatccgccgccagtgggttctggctttccgggaaaacgggatcaccacaatggaacaggttaacgcaggaatgcgcgtagcccgtcggcagaatcgaccatttctgccatcacccgggcagtttgttgcatggtgccgggaagaagcatccgttatcgccggactgccaaacgtcagcgagctggttgatatggtttacgagtattgccggaagcgaggcctgtatccggatgcagagtcttatccgtggaaatcgaacgcgcactactggctggttaccaacctgtaccagaacatgcgggccaatgcgctgactgacgcggaattacgacgcaaggctgccgatgaactgacctgtatgacagcgcgaattaaccgtggtgagacgatacctgaaccagtaaaacaacttcctgtcatgggcggcagacctctaaatcgtgttcaggcgctggcgaagatcgcagaaattaaagctaagttaggactgaaaggagcaagtgtatgacgggcaaagaggcaattattcattacctggggacgcataatagcttctgtgcgccggacgttgccgcgctaacaggcgcaacagtaaccagcataaatcaggccgcggctaaaatggcacgggcaggtcttctggttatcgaaggtaaggtctggcgaacggtgtattaccggtttgctaccaaggaagaacgggaaggaaagatgagcacgaacctgatttttaaggagtgtcgccagagtgccacgatgaaacggatattggcggtatatggagttaaaagatgaccatctacatcactgagctaataacaggcctgcaggtaatcgcaggcctttttatttgggggagagggaagtcatgaaaaaactaacctttgaaattcgatctccggcacatcagcaaaacgctattcacgcagtacagcaaatccttccagacccaaccaaaccaatcgtagtaaccattcaggaacgcaaccgcagcttagaccaaaacaggaagctatgggcctgcttaggtgacgtctctcgtcaggttgaatggcatggtcgctggctggatgcagaaagctggaagtgtgtgtttaccgcagcattaaagcagcaggatgttgttcctaaccttgccgggaatggctttgtggtaataggccagtcaaccagcaggatgcgtgtaagcgaatttgcggagctattagagcttatacaggcattcggtacagagcgtggcgttaagtggtcagacgaagcgcgactggctctcgaatggaaagcgcgatggggagatcgggctgcatgactatcaaatcaaatacgccagcacacgacaaggactgctggcaaacgccgctttggctttttgatgcactggatattgagtttggattctggctggattcggcagcgagcgacaaaaatgctctgtgcgctcactggctaactgaggacgacgacgcgctcaattctgagtgggtaagccacggtgcaatctggaataacccaccgtacagcaatatcaggccgtgggtggaaaaagccgctgagcagtgtatacaacagcgacagacggtagtgatgcttgtgccagaggatatgtctgtcggatggttcagcaaggctctggagagtgttgacgaagttcgtattatcactgatggacggattaattttatcgaaccatcgacagggctggagaagaagggaaacagcaaaggctccatgctgctgatttggcgaccgttcatcagtcctcgacggatgtttactaccgtatccaaagcggcattgatggcgatcgggcagggcgtcaggagggctgcatgagacgacagcgacgaagcatcaccgacataatctgcgaaaactgcaaataccttccaacgaaacgctccagaaataaacgcaagctaatcccaaaagaatctgacgtaaaaaccttcaattacacagcccacctgtgggatatccggtggctaagatatcgtgcgaggaaatgacaatggattattcacagttaagtgattttgaaattaacagaatggtaggagacataatttttaaaggcctttgggcaagtaaaccggaaacatcagggaataacaccaacaaatggtattacggaaatgctgatacaacttttgagccattaaatcatttgcctgactactgcaatgatccgagcgcttcatggccgattattgagaaatacaggatttctatcttagaccagttaactgaatggtgtgtggatgcaaaaggcgtaagcccaatatttgataccagacctctccgcgccgccatgattgtctttctcctgatgcaggaggccaataatgcttagcccatctcaatcccttcaatacctgaaagaaagcatagagcgggcttcaatgtgcacagagtggattctatctaggtttagcgcatacagaagattgccggtaaagggcatgccaagcaagtcgatgctgcatatgcaaaagaatgcgcgctggaaggtatggcgagaacacaggttatgtggctgaaagagggggttattaaggcgtgaatacctacagcatcacattaccctggcctccgagcaataatcgctattaccgccataatcgcgggcgcacgcacgtcagcgcagaggggcaggcataccgcgataacgtcgcccgaatcattaaaaacgcaatgctggatatcggcctggctatgcctgtgaaaatccgcattgagtgccacatgccggatcgccgtcgccgtgacctggataatctgcaaaaagccgcttttgacgcactcactaaagcaggtttctggctggatgatgctcaggtcgttgattaccgcgttgtgaagatgcctgttaccaaaggtgggaggctggaactgaccatcaccgaaatggggaatgaatgatgtttgagtttaatatggcagaacttcttcgccaccgctgggggcgtctgcgcttatatcgtttcctcggttctgttttgaccgattaccgaatactgaagaattacgccaaaaccctgacaggaacaggagtatgaagtcagagataacaatcaactaatactgttttgttgatttttgcttgtaattggcgttctggtctgatttttgtggagtaagttgatgcgtgatattcagatggttcttgagcgttggggtgcgtgggcggctaataatcatgaagatgtgacctggtcgtccattgccgccggttttaagggattaattccttcaaaagtaaaatctcgcccgcaatgttgtgacgatgacgcgatgatcatttgcgggtgcatggcccgtctgaaaaagaacaacagcgatttacacgatttattagtagattattatgtatgtggtatgacattcatgtcactggcaagtaagcattgctgctcggatggttatatcgggaaaaggttacagaaggctgagggcataattgaagggatgttaatggcattagatatccggttagatatggatatcgttgctaataattctaattgatatgcaattgtttactaaaagttattaaaaatggggcgtggaaacgcccccaaaataaagggtaatatataacagaaggtttatatagtaagaagcaaggtagtgcttctaaaggaagtggcttgagggctccacttatatgttgcggaggcaaagcctcccgcaacatatctttttcgtaagtcagattagaactgataaaccagacctacagcgacgatgtcgtcggtatcaataccagctgttttggtaaacttactatcgtcaattaagttgattttgtaatcaacaaaagtggacatgtttttattaaagtagtaagtagcaccgacatcgacatacttgactaagtctcggtcaccatgaacaccaaggtctttaccttttgactgaaggtaagcaacagatggacgcagaccgaagtcaaactgatattgtgctactgcttcaaagttttgtgctttgtttgcaatatggttattaccaaaaacggtcatattctgagtttcagaatatgtggtagccagatagatattgttcgcatcatatttcaggcctgcagcccatacttccgcatttttgccggaggcattgaatttgctcttaccataggcgacctgaccgtcagtgcgatctgatttagcataggttgcacccacgccgaatccttcatactcataagtagtggagaaaccgaaaccatcaccattggcttcagttacgtcagtgcggtcatttttaccctgatactgagcagcaaagttcaggccatcgaccagaccaaagaagtcgttgttacgataagttgcaacaccagtagtgcgaccagtcatgaacacatctgtttgggtccaggtatcaccaccgaattctggcagaacgtcagtccacgcaccgatgtcgtatgctacaccgtagttacggccgtaatcgattgagccgtaatcaccaaatttcaggcctgcaaatgcaagacgggttttgtctttggaagaaccttgagattcagcacggttgcctttgaattcatattcccactgaccgaaaccagtcagttgatcgttgatttgggtttcacctttgaagccaagacgggcataagtagtatcaccatcatctgcatcattagaggagaagtagtgcttggcattaactttcccgtatagatccagcttgttactgtctttattataaatttcagctgcctgagcagacatcgccatcagtactgatgcagctacagcagaaattgccactgttaattttttcattgtacgccctttttttgaacttttattaaaaaatgatgtcactgcgcgataaatattcatctaatcaatgtgattatttcaagatgtaagttttagtttctcatttaatttgtgaagtagatctctatttttatctgaaccttttctatctaatcctattcatggctcttgtctgaacaaaaataaatctattagctaatttatattaatggcacttatttataagtgctctataattctttagcttaatttaaacaaactaaaaataacatcggaaattattaactggttatttgttgaagttttcttatgcatttgtggtggtgttttgaacactcggtggcattctcacaaatatcatttagtagtttacgtacgtaaaaaattggttatgctgttaagagtggttacttcgtcacacagcttaaacccgccgtcgagcgggtttttccattttttgagtctcgatattagctgataacccaatacctgagttattcactgactccgaatctgttacgtttctgcctttattgcgatacgtagtatccccttaatttacacccgctttgtctgcgaggtggggttatgaaatccatggataagttaacaacgggtgtcgcctatggtacctcagcaggtagtgccgggtactggtttttacagttgctcgataaagtcacgccctcacagtgggcggcaataggtgtgctgggtagcctggtatttggcctgctgacgtacctgacaaacctttatttcaagattaaagaagataagcgcaaggctgcgagaggtgaataatgcctccatcattacgaaaagccgttgctgctgctattggtggcggagcaattgctatagcatcagtgttaatcactggcccaagtggtaacgatggtctggaaggtgtcagctacataccatacaaagatattgttggtgtatggactgtatgtcacgggcatacaggaaaagacatcatgctcggtaaaacgtataccaaagcagaatgcaaagccctcctgaataaagaccttgccacggtcgccagacaaattaacccgtacatcaaagtcgatataccggaaacaatgcgcggcgctctttactcattcgtttacaacgtgggtgctggcaatttcagaacatcgacgcttcttcgcaaaataaaccagggcgatatcaaaggcgcatgtgatcagctacgtcgctggacatatgctggcggtaagcaatggaaaggtctcatgactcgtcgtgagattgagcgtgaaatctgtttgtggggtcagcaatgaacagagtaaccgcgattatctccgctctggttatctgcatcatcgtctgcctgtcatgggctgttaatcattaccgtgataacgccattacctacaaagcccagcgcgacaaaaatgccagagaactgacgctggcgaacgcggcaattactgacatacagatgcgtcagcgtgatgttgctgcgctcgatgcaaaatacacgaaggagttagctgatgcgaaagctgaaaatgatgctctgcgtgatgatgttgccgctggtcgtcgtcggttgcacatcaaagcagtctgtcagtcagtgcgtgaagccaccaccgcctccggcgtggataatgcagcctccccccgactggcagacaccgctgaacgggattatttcaccctcagagagaggctgatcactatgcaaaaacaactggaaggaacccagaagtatattaatgagcagtgcagatagagctgcccatatcgatgggcaactcatgcaattattgtgagcaatacacacgcgcttccagcggagtataaatgcctaaagtaataaaaccgagcaatccatttacgaatgtttgctgggtttctgttttaacaacattttctgcaccaccacaaatttttgctgcatcgacagttttcttctgcccaattcccgaaacgaagaaatgatgggtgatggtttcctttggtgttactgctgtaggtttgtttccaacagtaaacgtctgttgagcacatcctgtaataagcattgccagagcggcagaaaacaacatttttttcatcttattatcctgcattgttaaaaacggcagaatcctatgtgacaacaattaaacgatagttaaatggattgatgaaaattaaaactacacaggtgggctcagactattggaggaagttggggacactcagaatcctgtggaatgaaataaaccggtctatccgtccattacccttttagctgcgctgtatcgtcgccgtattcccgcattaaccatgaccgtagcccgacggggaattccttctgcgtgagtgtgcgggaataattaaaaacgatgcacaccgggtttttaccgcgttaatgattcgcgggtttatcccggtgcgatggtggaagaaacaggaagctgtattacagaaagtgctactactgtatcccgatgcgatgtatgtaatgtgagtcagataatggcacaggatgtggtgatgtggcagtctggaacacaggatatattgtcagaataagacccgtaggaataaaaatgaaaagacgccttttactactttttctgttatctgtcctggcagtgggatgctcgcagcaaaaagctgatgagccccggcaattagtgacggtgtatccacgatatccggaatatgctgcagcaaattatatcaaggggctggttgaggttaagttcgatattggtgctgatgggactgtgacacggatcgtttttctccgctcagagcctcataatttgtttcgtgatgaagtggtgaaggccatggcgaaatggcgatttgaaaagaatcgcccctgtcagggagtgaagagacaatttatctttacgccgtcacgtccttgatgcttccaggtagagaggggctggaagcaggagaaaaatgaaagagccagcggttatatttttgtcatggctgacgaggaatgatggaagaaggcgttgtatgccacacaacgcctcactgttcatttcttctttttctctggtggaacccgatgaataagagttgcactggtttccgatgagatggcgatatactcgggcaaagtatgctggcagttttccaactggtcaaaaatacctgctctcgtctgttgcaatgcctgcagcatgcggcggcaatgcgccttgcttttactaaccatctttccttcctctatcagtcgctgcgtgaactcatcatggaataccaggtaaatgcggatgttatcggttttggctacgcagcatagtacaaaacggacaggtgcatcccgggacgggggaggcgtcacatgtccctgtgatggttgttccgggtaatgtactgtgtggggcataaaaatgtccgataattttactttctaccgcagttagttgattcgttggtcctggtagcacattgggcgaggatttaaatgccaggcaactgaaggatgatgtcgcaagggagatagcgagaatatttctgattttcatttgatgatgcctctgtgtgaaatgacggtaaacgacgcacttgtgccggcacataatagcaagcaccataatagatcagattcgattcttgctgtaagtgataattattctcgttttcgggtcctttccgtcgatccaacaggttacggggcggcgacctcgcggtttttcactatttatgaaaatttttcagggaaaatcgtgtcggtacttctcgaatataactttttgttttttttaatattgcatccgtaaaggtccgacatgaaagtgtccgaaaatgcctttttctggcgttttcatgtcgggccttgtatttgataatgggttgttttcatgaaggttaataaaaagaggcttgccgaaattttcaacgtggacccgcggacgattgaacgctggcagtctcagggactcccttgcgcctccaaaggtagtaagggcattgaatctgtatttgatactgccatggcaattcagtggtatgcgcagagggaaactgatatcgaaaacgaaaagctccgcaaagaactggacgatttgcgtgcggcagcggagtcagatttacaacccggcaccattgactatgaacgctaccggcnnnnnnnnnnnnnnnnnnnnnnnnnnnnnnnnnnnnnnnnnnnnnnnnnnnnnnnnnnnnnnnnnnnnnnnnnnnnnnnnnnnnnnnnnnnnnnnnnnnnnnnnnnnnnnnnnnnnnnnnnnnnnnnnnnnnnnnnnnnnnnnnnnnnnnnnnnnnnnnnnnattataaatttcagctgcctgagcagacatcgccatcagtactgatgcagctacagcagaaattgccactgttaattttttcattgtacgccctttttttgaacttttattaaaaaatgatgtcactgcgcgataaatattcatctaatcaatgtgattatttcaagatgtaagttttagtttctcatttaatttgtgaagtagatctctatttttatctgaaccttttctatctaatcctattcatggctcttgtctgaacaaaaataaatctattagctaatttatattaatggcacttatttataagtgctctataattctttagcttaatttaaacaaactaaaaataacatcggaaattattaactggttatttgttgaagttttcttatgcatttgtggtggtgttttgaacactcggtggcattctcacaaatatcatttagtagtttacgtacgtaaaaaattggttatgctgttaagagtggttacttcgtcacacagcttaaacccgccgtcgagcgggtttttccattttttgagtctcgatattagctgataacccaatacctgagttattcactgactccgaatctgttacgtttctgcctttattgcgatacgtagtatccccttaatttacacccgctttgtctgcgaggtggggttatgaaatccatggataagttaacaacgggtgtcgcctatggtacctcagcaggtagtgccgggtactggtttttacagttgctcgataaagtcacgccctcacagtgggcggcaataggtgtgctgggtagcctggtatttggcctgctgacgtacctgacaaacctttatttcaagattaaagaagataagcgcaaggctgcgagaggtgaataatgcctccatcattacgaaaagccgttgctgctgctattggtggcggagcaattgctatagcatcagtgttaatcactggcccaagtggtaacgatggtctggaaggtgtcagctacataccatacaaagatattgttggtgtatggactgtatgtcacgggcatacaggaaaagacatcatgctcggtaaaacgtataccaaagcagaatgcaaagccctcctgaataaagaccttgccacggtcgccagacaaattaacccgtacatcaaagtcgatataccggaaacaatgcgcggcgctctttactcattcgtttacaacgtgggtgctggcaatttcagaacatcgacgcttcttcgcaaaataaaccagggcgatatcaaaggcgcatgtgatcagctacgtcgctggacatatgctggcggtaagcaatggaaaggtctcatgactcgtcgtgagattgagcgtgaaatctgtttgtggggtcagcaatgaacagagtaaccgcgattatctccgctctggttatctgcatcatcgtctgcctgtcatgggctgttaatcattaccgtgataacgccattacctacaaagcccagcgcgacaaaaatgccagagaactgacgctggcgaacgcggcaattactgacatacagatgcgtcagcgtgatgttgctgcgctcgatgcaaaatacacgaaggagttagctgatgcgaaagctgaaaatgatgctctgcgtgatgatgttgccgctggtcgtcgtcggttgcacatcaaagcagtctgtcagtcagtgcgtgaagccaccaccgcctccggcgtggataatgcagcctccccccgactggcagacaccgctgaacgggattatttcaccctcagagagaggctgatcactatgcaaaaacaactggaaggaacccagaagtatattaatgagcagtgcagatagagctgcccatatcgatgggcaactcatgcaattattgtgagcaatacacacgcgcttccagcggagtataaatgcctaaagtaataaaaccgagcaatccatttacgaatgtttgctgggtttctgttttaacaacattttctgcaccaccacaaatttttgctgcatcgacagttttcttctgcccaattcccgaaacgaagaaatgatgggtgatggtttcctttggtgttactgctgtaggtttgtttccaacagtaaacgtctgttgagcacatcctgtaataagcattgccagagcggcagaaaacaacatttttttcatcttattatcctgcattgttaaaaacggcagaatcctatgtgacaacaattaaacgatagttaaatggattgatgaaaattaaaactacacaggtgggctcagactattggaggaagttggggacactcagaatcctgtggaatgaaataaaccggtctatccgtccattacccttttagctgcgctgtatcgtcgccgtattcccgcattaaccatgaccgtagcccgacggggaattccttctgcgtgagtgtgcgggaataattaaaaacgatgcacaccgggtttttaccgcgttaatgattcgcgggtttatcccggtgcgatggtggaagaaacaggaagctgtattacagaaagtgctactactgtatcccgatgcgatgtatgtaatgtgagtcagataatggcacaggatgtggtgatgtggcagtctggaacacaggatatattgtcagaataagacccgtaggaataaaaatgaaaagacgccttttactactttttctgttatctgtcctggcagtgggatgctcgcagcaaaaagctgatgagccccggcaattagtgacggtgtatccacgatatccggaatatgctgcagcaaattatatcaaggggctggttgaggttaagttcgatattggtgctgatgggactgtgacacggatcgtttttctccgctcagagcctcataatttgtttcgtgatgaagtggtgaaggccatggcgaaatggcgatttgaaaagaatcgcccctgtcagggagtgaagagacaatttatctttacgccgtcacgtccttgatgcttccaggtagagaggggctggaagcaggagaaaaatgaaagagccagcggttatatttttgtcatggctgacgaggaatgatggaagaaggcgttgtatgccacacaacgcctcactgttcatttcttctttttctctggtggaacccgatgaataagagttgcactggtttccgatgagatggcgatatactcgggcaaagtatgctggcagttttccaactggtcaaaaatacctgctctcgtctgttgcaatgcctgcagcatgcggcggcaatgcgccttgcttttactaaccatctttccttcctctatcagtcgctgcgtgaactcatcatggaataccaggtaaatgcggatgttatcggttttggctacgcagcatagtacaaaacggacaggtgcatcccgggacgggggaggcgtcacatgtccctgtgatggttgttccgggtaatgtactgtgtggggcataaaaatgtccgataattttactttctaccgcagttagttgattcgttggtcctggtagcacattgggcgaggatttaaatgccaggcaactgaaggatgatgtcgcaagggagatagcgagaatatttctgattttcatttgatgatgcctctgtgtgaaatgacggtaaacgacgcacttgtgccggcacataatagcaagcaccataatagatcagattcgattcttgctgtaagtgataattattctcgttttcgggtcctttccgtcgatccaacaggttacggggcggcgacctcgcggtttttcactatttatgaaaatttttcagggaaaatcgtgtcggtacttctcgaatataactttttgttttttttaatattgcatccgtaaaggtccgacatgaaagtgtccgaaaatgcctttttctggcgttttcatgtcgggccttgtatttgataatgggttgttttcatgaaggttaataaaaagaggcttgccgaaattttcaacgtggacccgcggacgattgaacgctggcagtctcagggactcccttgcgcctccaaaggtagtaagggcattgaatctgtatttgatactgccatggcaattcagtggtatgcgcagagggaaactgatatcgaaaacgaaaagctccgcaaagaactggacgatttgcgtgcggcagcggagtcagatttacaacccggcaccattgactatgaacgctaccggctcacaaaagcgcaggcagatgcgcaggaactgaaaaatgcccgtgaagacggagtagtgctggaaactgaactgtttaccttcattctgcaacgtgtggcacaggagatttcggggatacttgtgcgtgtgccgttgacattacagcgtaaatatccggacatttcaccatcacaccttgatgtggtgaaaactgaaatcgcgaaagcctccaatgttgcagctaaggccggtgaaaacgtgggcgggtggatcgatgatttcagacgcgcagaaggcagctaatgcagccggtgcgatagctacagggcttttatctctcattattcctgttccactgacgacagttcagtgggccaataaacattattaccttcctaaagagtcgtcttataccccggggcgatgggaaacactgccgtttcaggttggcatcatgaactgtatgggcaacgatctgattcgcacggttaacctgattaaatctgcccgtgttggttatacaaagatgttgctgggagtggaggcttattttattgagcataaatcacgcaacagccttctttttcagcccacggactcagctgctgaagattttatgaaatctcatgttgagccaacgataagggatgttcctgcattgctggagctggctccatggttcggaagaaaacaccgcgataatacgctcaccctgaagcgtttttcctccggtgtggggttctggtgtctgggtggtgcggcagcaaaaaactaccgtgaaaaatccgtggatgtggtctgttatgacgagctttcctcgttcgaaccggatgttgaaaaagagggttcgccaaccctgctgggggataaacgtattgagggctctgtatggccaaaatccattcgcggctcgacgcctaaaatcaaaggctcctgccagatcgaaaaagccgctaacgagtcggcacacttcatgcgtttttatgtgccctgtccgcactgtggggaggagcagtatctgaaatttggcgatgatgcctcgcctttcggtcttaagtgggagaagaataagccagaaagtgttttctacctttgtgagcatcatggctgtgtgatccatcagtctgagcttgaccagagtaacgggcggtggatctgtgaaaacacgggcatgtggacccgtgacggcctgatgtttttcagcgcccggggtgatgaaattccgccgccgcgctccatcactttccatatctggacggcgtacagtccgttcaccacctgggtacagattgtctatgactggctggatgcactgaaagatcccaacggcctgaaaacctttgtgaacaccacgctgggcgagacctgggaagaggctgtgggcgaaaaactcgatcaccaggtgctgatggataaggttgtgcgttacacggcggcggtgcctgcccgggtggtttatctgacggcgggcattgactcgcagcgaaaccgttttgagatgtatgtctggggatgggctccgggagaggaagcctttctggtggataaaatcatcattatggggcgtcccgatgaggaagagacgctgttacgtgtggatgcggcgatcaacaaaaaataccgccatgcagacggaaccgaaatgaccatttcccgtgtctgctgggacatcggggggatcgatggcgaaatcgtttatcagaggtcaaaaaaacacggtgttttccgggtgctgccggtaaaaggcgcgtctgtctatggcaagccggtgatcaccatgccgaaaacccgcaatcagcggggcgtttatctgtgtgaagtggggacggacaccgcaaaagaaattctctatgcccgtatgaaagccgagcccacgcctgcggatgaagccacgtcgtatgccatccgttttcctgatgatccggagattttttcgcagacagaggcgcagcaactggtcgcggaagagcttgtggagaagtgggaaaaaggaaagatgcgtctgctgtgggataacaaaaagcggcgtaacgaagcgctggactgcctggtgtatgcctacgcggcattacgtgtgtccgtgcaacgctggcagcttgatctggctgtactggcaaaatcccgggaagaagagacgacccggccaacccttaaagaactggcagcgaagctgtccggaggagtgaatggttacagtcgctgaactgcaggcgctgcgtcaggcgcgccttgatttattaaccggtaaacgggtggtgtctgtccagaaagatggtcgcagaattgaatatacggcggcttctctggatgagcttaaccgggcgatcaatgatgcggagtcggtactggggacaacccggtgtcgccgtcgtccgctgggagtgaggttatgaaacgaacgcctgtcctgattgatgtgaacggcgttccgcttcgtgagagtctcagctacaacgggggcggtgcaggatttggcgggcaaatggctgagtggttgccaccggcgcagagtgccgatgcggccctgctgcccgcgttgcgtctggggaatgcccgggcagatgatctggtgcgcaataacggaatagcggctaatgcggtggctctgcataaggatcacattgtcgggcatatgtttctgatcagctaccgtccgaactggcgctggctggggatgcgggagaccgcagcaaaaagctttgtcgatgaggtggaggcggcctggtcggaatacgccgaagggatgtttggcgagatcgacgtggaaggaaaacgcacgttcacggaatttatccgtgaaggtgtgggcgttcatgcgtttaacggcgaaatctttgtgcagccggtctgggatacggaaaccacgcagttattccgtacgcgttttaaagccgtgagtccgaaacgggtggacacgcctggacacggtatggggaaccgttttctgcgggccggtgtggaggtcgatcgatatggccgtgccgtcgcgtaccatatctgtgaggatgattttccgttctctggtagtggacgatgggaacggatcccgcgtgaacttcccaccgggcgtccggccatgctgcatattttcgagccggtggaggacgggcagacccgtggggctaatcagttttacagcgtcatggaacggctgaagatgctcgattccctgcaggcaacacagcttcagtcggccatagtgaaggcgatgtatgcagcgacgattgaaagtgaacttgataccgaaaaggcctttgaatatatcgccggcgcgccacaggagcagaaggataatccgcttattaatattctggagaagttctccagctggtatgacacgaataacgtgacactgggcggtgtcaaaattccgcaccttttccctggtgatgatctgaaactacagactgcgcaggattcagacaatggattttctgcgcttgaacaggcgctgctgcggtatatcgccgccggtcttggcgtttcctacgaacagttgtcccgtgattactcgaaggtcagttactcaagtgcccgcgcctccgccaatgagtcgtggcgctattttatggggcggcgaaaatttattgcggcccggctggccacgcagatgttttcctgctggctggaagaggcacttcttcgggggattattcgtccgccacgggcacgttttgatttttatcaggcgcgatcagcctggtcacgggcagagtggattggtgccggaagaatggccattgacgggctcaaggaagtccaggaatcagtgatgcgcattgaggccggactgagcacgtatgagaaagagctggcgctgatgggcgaggattatcaggacattttccgccagcaggtcagggaatctgctgagcggcaaaaagccggactctcacgtccggtgtggatagagcaggcgtatcagcagcagatagcggagagtcgtaggccggaagaggagacaacaccacgtgagacgtaatctttcacacattattgccgcagcattcaatgaaccgctgcttctggagcccgcctatgcgcgggttttcttttgcgcgctcgggcgcgagatgggggcagcaagtctttcggtaccacaacagcaggtacagtttgatgctcccggaatgctggctgaaacggacgagtacatggccggaggtaaacgaccggcccgtgtttaccgggtggtgaacggtattgctgtactgccggtgaccggcacgctggtgcaccggctgggtggtatgcggccattttccggaatgacaggctatgacggcattgtcgcctgtcttcagcaggcaatggcggatagccaggtgcggggcgtactgctggacattgacagtccgggcgggcaggccgccggcgcgtttgactgcgctgacatgatttaccgcctccgtcagcagaagccggtctgggcactgtgcaatgacacggcctgttctgcagccatgctgctggcgtcggcctgctcccgacggctggttacccagacatcccgtatcggctccattggcgtgatgatgagccatgtcagctatgccggtcatctggcgcaggccggtgtggatatcacgctgatttactcaggggcgcacaaggtggatggcaatcagtttgaagcgttgccggcagaggttcgccaggacatgcagcagcggattgatgcggcgcgccggatgtttgccgaaaaagtggcgatgtataccggtctgtctgttgatgccgtcacgggaacagaggctgccgtttttgaaggtcagtccggcattgaggccgggctggcggatgaattaatcaatgcgtcggatgccatcagtgtgatggccacggcgctgaacagtaatgtcagaggaggcactatgccgcaattaactgcaacggaagccgccgcgcaggagaaccagcgagtgatggggatcctgacatgccaggaagcgaaaggacgtgaacagcttgccacgatgctggcaggacaacagggcatgagcgttgaacaggcccgggcgattctggccgcggcggcaccgcagcagccggtggcatccacgcagagtgaagccgatcgcattatggcgtgtgaagaagcgaacggtcgtgaacaactggcggcaacgctggcggcgatgccggagatgacggtggaaaaagcccgcccgatcctggctgcttcaccgcaggcggatgccggaccatcactccgtgatcagatcatggcactggatgaggcaaaaggggctgaggcgcaggctgaacagctggctgcctgcccgggaatgacagtggagagcgcccgggctgtgctggctgcgggatcaggtaaggcagaaccggtctctgcatccacaaccgccatgtttgaacatttcatggcgaaccattcaccggcagcggtacagggtggcgtggcacagacgtcagcagacggtgatgcggacgtgaaaatgctcatggccatgccatgaagtcagtgctgaccatcaataggaggtttttacaatatggtgacgaaaaccatcactgaacagcgtgcggaagtacgtatttttgccggtaatgatccggctcataccgccacaggcagcagcgggatttcctcgccaacaccggcactgacgcccctgatgctggatgaagccaccgggaaactggtggtctgggacggacagaaagccggtagtgcggttggcatactggtactgccgcttgaaggcacagagacggcgctgacgtattacaagtcgggaacctttgcgacggaggcaatccactggcctgaaagtgtggatgaacacaaaaaggccaacgcctttgctggcagtgccctgagtcacgcggcgctgccgtaacacgttatcaggccaccgcggtggcctgactgatttctgaatgaaaggaactgatttatgggattgtttacgacccgccagttactcggttataccgaacaaaaagttaaatttcgtgcgctgtttctggagctgtttttccgccgtacggtgaatttccataccgaagaggtgatgctggacaaaattaccggaaaaacgccggtggcggcctatgtctccccggttgttgaaggaaaagtgctgcgtcatcgtggtggtgaaacccgcgtgttgcgtccgggctacgtcaagccgaaacacgaatttaattaccagcaggcggttgagcgccttcctggtgaagatccatctcaactgaatgatccggcttaccgccgtctgcgtatcattaccgataacctcaaacaggaagagcacgcgattgtccaggtggaagaaatgcaggcggtaaatgctgtgttgtatggcaaatacaccatggaaggagaccagttcgagaaaattgaggtcgattttggcaggtcgacgaagaataacatcactcagggtagtggtaaggagtggtcaaaacaggatcgtgacacgttcgatcctacacatgatattgacctctactgcgacctggccagcggtcttgtgaatattgccattatggacggtaccgtctggcgtcttctgaatggttttaagctgttccgcgaaaaactggatacccgtcgcggttcaaattctcaactcgaaacggcagtgaaagatctgggcgcagtggtgtccttcaaggggtattacggcgatctggccattgtggtggcgaaaacgtcttatatagcagaagacggtatcgaaaaacgttatcttccagatggcatgctggttctggggaatactgctgcagatgggatccgttgttacggtgccattcaggatgctcaggcgttgtccgaaggtgtggtggcctcttcccgttatccgaaacactggctgacggtaggggatcccgcccgtgaatttaccatgacgcagtccgcgccgctgatggtgttgccggacccggatgagtttgtggtggtacaggtgaaataatccgtgagcgggggcgaaatgcccccgtgtcttttttcacagggggctgatatggcaacgaaagagcaaaatctgaaacggcttgatgaactggccctgattctggggcgtgagccggatatatccgggagtgccgcagagatagcgcagcgggtggcagaatgggaagaggaaatgcagtcatccggcgatgatgtacaggttatgaatatggatatccgggagcgggaaaccgcggctcatgatgttcgtgaggaaacatccggcgcgttaacgcgcatcagagttctgacctgcctccatctctgtggcgttgatggtgaaacgggggaatccgttgagcttgcggatgttggtcgggtgattctgattatgtcctcagatgcaaaaacacacgttgatggtggaatggctgtttatgcgtgattttcagaatgcctttgatgccgcccttgccggggtggacagtacgattgttgaagtgatgggcatcagtgcgcagttcacctccggtgcacagcgtggcggcgaggttcatggcgtttttgacgatccggagtcgctgggttttgccagtagtgggatccgtattgaaggaagtaacccgtcattatttgtgcttacggatacggtttgtgctgtacggcgtggtgacacgctgaccattaacggcgagatgttctgggtggaccgtgtttctccggatgacggagggagttgttatctctggctcaaccgggggcaaccacctgccgccagccgtcgccgctgaaagggggatgtatggccataaaaggtcttgagcaggccgttgaaaacctcagccgtatcagcaaaacggcagtgcctggtgccgccgcaatggccattaaccgcgttgcttcatccgcgatatcgcagtcggcgtcactggttgcccgtgagacaaaggtacgccggaaactggtaaaggaaagggccaggctgaaaagggccacggtcaaaaatccgcaggccagaatcaaagttaaccggggggatttgcccgtaatcaggctgggtaatgcgcgggttgtcctttcgcgccgcaggcgtcgtaaaaaggggcagcgttcatccctgaaaggtggcggcagcgtgcttgtggtgggtaaccgtcgtattcccggcgcgtttattcagcaactgaaaaatggccgctggcatgtcatgcagcgtgtggccgggaaaaaccgttaccccattgatgtggtgaaaattccgatggcggtgccgctgaccacggcgtttaaacagaatattgagcggatacggcgtgagcgtcttccgaaagagctgggctatgcgctgcagcatcaactgaggatggtaataaagcgatgaaacatactgaattccgtgcagccgtactggatgcactggaaaaacatgacaccggggcgacgctttttgatggtcgccccgctgtttttgatgaggcggattttccggcaattgccgtttatctcaccggcgctgaatacacgggcgaagagctggacagcgatacctggcaggcggagctgcatattgaagttttcctgcctgctcaggtgccggattcagagctggattcgtggatggaaagccggatttatccggcgatgagcgatatcccggcactgtcagatttgatcaccagtatggtggccagtggctatgactaccggcgcgacgatgatgcgggcctgtggagttcagccgatctgacttatgtcattacctatgaaatgtgaggacgatatgccaacaccaaatcctctggcaccggtgaaaggggccggaaccacactgtgggtttataacgggagcggcgacccttatgcaaacccgctttcagacaatgactggtcgcgtctggcaaaaattaaagacctaacgcccggcgaactgaccgctgagtcctatgacgacagttatctcgatgatgaagatgcggactggaccgcgaccgggcaggggcagaaatccgccggagataccagcttcacgctggcgtggatgcccggagagcaggggcagcaggcgctgctggcgtggtttaatgaaggtgatacccgtgcctataaaatccgcttcccgaacggcacggtcgatgtgttccgtggctgggtcagcagtatcggtaaggcggtgacggcgaaggaagtgatcacccgtacggtgaaggtcaccaatgtgggccgtccgtcaatggcagaagatcgcagtacggtgacggcggcaaccggtatgaccgtgacgcctgccagctcctcggtggtgaaagggcagagcaccacgctgaccgtggccttccagccggagggcgcaactgacaagagcttccgtgcggtgtcagcggataaaacaaaagccaccgtgtcggtcagtggtatgaccatcaccgtgaacggcgttgctgcaggcaaggtcaacattccggttgtatccggtaatggtgaacttgctgcggttgcagaaatcactgtcaccgacagttaatccggagagtcagcgatgttcctgaaaaccgaatcatttgaacataacggcgtgaccgtcacgctttctgaactgtcagccctgcagcgtattgagcatctcgccctgatgaaacagcaggcagaacaggcggagtcagacagcaaccggcaggttactgtggaagacgccatcagaaccggtgcttttgtggtggcgatgtccctgtggcataaccatccgcagaagacaaagcagccttccatgaatgaagccgttaaacagattgagcaggaagtgcttaccacctggcccgcggaggcaatttctcatgctgaaaacgtggtgtaccggctgtccggtatgtatgggtttgtggtgaatgatgcccctgaccaggcagaggactccgggcctgcagagcctgtttctgcgggaaagtgttcgacggtgagctgagttttgccctgaaactggcgcgagagatggggcgacctgactggcgcgccatgcttgccgggatgtcatccacggagtatgccgactggcaccgcttttacagtacccattattttcatgatgttctgctggatatgcacttttccgggctgacgtacactgtgctcagcctgtttttcagcgatccggatatgcatccgctggatttcagtttgctgaaccggcgtgaggatgacgaagagcctgaagatgatgtgctgatgcagaaagcggcagggcttaccggaggcgtccgctttgacccggacggaaatgaagttatccccgcttccccggatatggcgggcatgacggaggatgacgtaatgctgatgacagtatcagaagggatcgcaggaggagtccggtatggctgaaccggtaggcgatctggtcgttgatttaagtctggatgcggccagatttgacgagcagatggccagagtcaggcgtcatttttccggtacggaaagtgatgcgaaaaaaacagcggcagtcgttgaacagtcgctgagccgacaggcgctggctgcacagaaagcggggatttccgtcgggcagtataaagccgccatgcgtatgctgcctgcacagttcaccgacgtggccacgcagcttgcaggcgggcaaagcccgtggctgatcctgctgcaacagggtggtcaggttaaggactccttcggcgggatgatccccatgttccgggggcttgccggtgcgatcaccctgccgatggtcggggccacctcgctggcggtggcgaccggtgcgctggcgtatgcctggtatcagggtaactcaaccctgtccgatttcaacaaaacgctggtcctttccggcaatcagtcgggtctgacggcagatcgtatgctggtcctgtccagagccgggcaggcggcagggctgacgtttaaccagaccagcgagtcactcagcgcactggttaaggcgggagtaagcggtgaggctcagattgcatccatcagccagagtgtggcgcgtttctcctctgcatccggcgtggaggtggacaaggtcgctgaagccttcgggaagctgaccactgacccgacgtcggggctgacggcgatggcgcgccagttccataacgtaacggcggagcagattgcgtatgttgctcagttgcagcgttccggcgatgaatccggggcattgcaggcggcgaacgaggccgcaacgaaagggtttgatgaccagacccgacgcctgaaagagaacatgggcacgctggaaacctgggcagacaggacagcacgggcattcaaatccatgtgggatgcggtgctggatattggtcgtcctgataccgctcaggagatgctgattaaggcagaggctgcgtttaagaaagcggacgacatctggaatctgcgcaaggatgattattttgttaacgatgaagcgcgggcgcgttactgggatgatcgtgaaaaggcccgtcttgcgcttgaagccgcccgaaagaaggctgaacagcagagtcaacaggacaaaaatgcgcagcagcagagcgataccgaagcatcacggctgaaatataccgaagaggcgcagaaggcttacgaacggctgcagacaccgctggagaaatataccgcccgtcaggaagaactgaacaaggcactgaaagacgggaaaatcctgcaggcagattacaacacgctgatggcggcggcgaaaaaggattatgaagcgacgctgaaaaagccgaaacagtccggcgtgaaggtgtctgcgggcgatcgtcaggaagacagtgctcatgctgccctgctgacgcttcaggctgaactccggacgctggagaagcatgccggagcaaatgagaaaatcagccagcagcgccgggatttgtggaaggcggagagtcagttcgcggtactggaggaggcggcgcaacgtcgccagctgtctgcacaggagaaatccctgctggcgcataaagatgagacgctggagtacaaacgccagctggctgcacttggcgacaaggttacgtatcaggagcgcctgaacgcgctggcgcagcaggcggataaattcgcacagcagcaacgggcaaaacgggccgctattgatgcgaaaagccgggggctgactgaccggcaggcagaacgggaagccacggaacagcgcctgaaggaacagtatggcgataatcctctggcgctgaataacgtcatgtcagagcagaaaaagacctgggcggctgaagacctgcttcgcgggaactggatggcaggcctgaagtccggctggagtgagtgggaagagagtgccacggacagtatgtcgcaggttaaaagtgctgccacgcagacctttgatggtattgcgcagaatatggcggcgatgctgaccggcagtgaacagaactggcgcagcttcacccgttccgtgctgtccatgatgacagaaattctgcttaagcaggcaatggtggggattgtcgggagtatcggcagcgctattggcggggctgttggtggcggcgcatccgcgtcaggcggtacagccattcaggccgctgcggcgaaactccattttgcaaccggaggatttacgggaaccggcggcaaatatgagccagcggggattgttcaccgtggtgaatttgtcttcacgaaggaggcaaccagccggattggcgtgggaaatctctaccggctgatgcgcggctatgccaccggcggttatgtcggtggcaccggaagtccggcgcaaatgcggcgttcagagggtatcaggtttgagcagaacaacaacgtggtgattcagaacgacggtacgaatggtctgccaggtccacagatgatgaaggcggtgtatgacatggcccgcaagggtgcccgtgatgaaatccaggcacagatgcgcgatggtggtctgttctccggaggtggacgatgaaaaccttccgctggaaagtgaaacccgggatggatgtgacatcggctccttccgtcagggaggtgcgctttggtgatggctattcccagcgtgcgcctgccgggctgaacgctgacctgaaaacgtacagcgtgacgctgtctgtctcccgtgaggaggccacggcgctggagtcgtttctggctgagcacgggggctggaaggcctttctgtggacgccgccttatggttacaggcagataaaggtgacctgcgcaaaatggtcgtcgcgggtcagtatgctgcgtgttgagttcagcgcagagtttgaacaggtggtgaactgatgcaggatatccggcaggaaacattgaatgaatgcacccgtgcggagcagtcggccagcgtggtgctctgggaaatcgatctgacagaggtcggtggagaacgttattttttctgtaatgagcagaacgaaaaaggtgagccggtcacctggcaggggcgacagtatcagccgtatcccattcaggggagtagttttgaactgaatggcaaaggcaccagtacgcgccccacgctgacggtttctaacctgtacggtatggtcaccgggatggtggaagatctgcagagtctggtcggcggaacggtggtcaggcgtaaggtttacgcccgttttctggatgcggtgaacttcgtcaacggaaacagcgacgccgatccggagcaggaggtgatcagccgctggcgcatcgagcagtgcagcgaactgagtgcggtcagtgcctcctttgtactgtccacaccgacggaaacggatggtgccgtttttccggggcgcatcatgctggctaatacctgcacctggacctatcgcggtgatgagtgcggttatcacggtccggcggtcgcggatgaatatgatcagccgacttccgatatcacgaaggataaatgcagcaaatgcctgagcggctgtaagtttcgcaataacgtcggcaactttggcggcttcctttccattaacaaactttcgcagtaaatcccatgacagagacagaatcagcgattctggcgcatgcccggcgatgtgcgccagcggagtcgtgcggcttcgtggtgagagcgccggagggggaaagatattttccctgcgtgaatatctccggtgagccggaggcgtatttccggatggctccggaggactggctgcaggcagagatgcagggtgagattgtggcgctggtccacagtcatcccggtggtctgccctggctgagtgaggccgaccggcggctgcaggtgcagagtgatttgccgtggtggctggtctgccggggggcgattcataagttccgctgtgtgccgcatctcaccgggcggcgctttgagcacggggtgacggactgttacacgctgttccgggacgcttaccatctggcggggattgagatgccggactttcatcgtgaggatgactggtggcgtaacggccagaatctctatcttgataatctggaggccacagggctgtatcaggtgccgttgtcagcggcgcagccgggcgatgtgctgctgtgctgctttggttcatcggtgccgaatcatgccgctatttactgtggtgacggcgagctgctgcaccatattcctgaacaactgagtaaacgagagaggtataccgacaaatggcagcgacgcacacactccctctggcgtcaccgggcatggcgcgcatctgcctttacggggatttacaacgatttggccgccgcatcgaccttcgtgtgaaaacgggggctgaagccatccgcgcactggccacacagctcccggtgtttcgtcagaaactgagcgacggctggtatcaggtacggattgccgggcgggacgtcagcacgtccgggttaacggcgcagttacatgagactctgcctgatggcgctgtgattcatattgttcccagagtcgccggggccaagtcaggtggcgtattccagattgtcctgggggctgccgccattgccggatcattctttaccgccggagccacccttgcagcatggggggcagccattggggccggtggtatgaccggcatcctgttttctctcggtgccagtatggtgctcggtggtgtggcgcagatgctggcaccgaaagccagaactccccgtacacagacaacggataacggcaaacagaacacctatttctcctcactggataacatggttgcccagggcaatgttctgccggttctgtacggtgaaatgcgcgtggggtcacgcgtggtttctcaggagatcagcacggcagacgaaggggatggtggtcaggttgtggtgattggtcgctgatgcaaaatgttttatgtgaaaccgcctccgggcggttttatcgtttatggagcatgaggaatgggtaaaggcagcagtaaggggcataccccgcgcgaagcgaaggacaacctgaaatcatcccagatgctgagcgtgatagacgccatcagcgaagggccggttgaaggtccggtggatggattaaaaagcgtgctgctgaacagtacgccggtgctggacagtgaggggaataccaatatattcggcgtcacggtggtgttccgggccggtgagcaggagcagacaccgccggagggatttgaatcctccggctccgagacggtgctcggtacagaagtgaaatatgacacgccgatcacccggaccatcacgtcggcaaacattgaccgtctgcgttttactttcggcgtgcaggcactggtggaaaccacctcaaagggggacaggaatccatcggaagtccgcctgctggttcagattcaacgtaacggtggctgggtgacggaaaaagacatcaccattaagggcaaaaccacgtcgcagtatctggcctcggtggtggtggataacctgccgccgcgcccgtttaatatccggatgcgcaggatgacgccggacagcaccacagaccagttgcagaacaaaacgctctggtcgtcatacaccgaaatcatcgatgtgaaacagtgctacccgaacacggcactggtcggcgtacaggtggactcggagcagttcggcagccagcaggtgagccgtaattatcatcttcgcgggcgcattctgcaggtgccgtcgaactataacccgcagacgcggcaatacagcggtatctgggacggaacgtttaagccagcatacagcaacaacatggcctggtgtctgtgggatatgctgacccatccgcgctacggcatggggaaacgtcttggtgcggcagatgtggataaatgggcgctgtatgtcatcggccagaattgcgaccagtcagtgccggacggctttggcggcacggagccgcgcatcacctgtaatgcgtacctgaccacacagcgcaaggcgtgggatgtgctcagtgatttttgctcggcgatgcgctgtatgccggtatggaacgggcagacgctgacattcgtgcaggaccgaccgtcggataaggtgtggacctataaccgcagtaatgtggtgatgccggatgatggcgcgccgttccgctacagcttcagcgccctgaaagaccgccataatgccgttgaggtgaactggattgacccggataacggctgggagacggcgacagagcttgtggaggacacgcaggccattgcccgttacggtcgtaacgtcacgaagatggatgcctttggctgtaccagccgggggcaggcacaccgcgccgggctgtggctgattaaaacggagctgctggaaacgcagaccgtggacttcagcgtgggtgcagaagggcttcgccatgtaccgggcgatgtcattgaaatctgtgatgatgactatgcggggatcagcatcggcgggcgcgtgctggcggtgaacaaccagacgcggacactgacgctcgaccgtgaaatcacgctgccatcctccggcaccacgctgataagcctggctgacggacaggggaatccggtcagcgtggaggtccagtccgtcaccgacggcgtgaaggtaaaagtgagccgtgttcctgacggcgttgcagaatacagcgtgtgggggctgaagttgccaacgttgcgccagcgcctgttccgctgtgtgagtatccgtgagaacgatgacggcacgtatgccatcactgccgtgcagcatgtaccggaaaaagaggccatcgtggataacggggcgcactttgacggcgaccagagcggcacggtgaatggtgtcacgccgccagcggtgcagcacctgactgccgaagtcaccgcagacagcggggaatatcaggtgctggcgcgctgggacacgccgaaggtggtgaagggggtgagctttatgcttcgcctgaccgtggcagcggatgacggcagtgagcggctggtcagcacggcccggacgacggaaaccacataccgcttcaggcaactggcgctggggaactacaggctgacagtccgggcggtaaatgcgtgggggcagcagggcgatccggcatcggtatcgttccggattgccgcaccggcagcgccgtcgcagattgagctgacaccggggtattttcagataaccgccacgccgcatcttgcggtttatgatccgacggtacagtttgagttctggttctcggaaaagcggattgcggatatcaggcaggttgaaaccacagcacgctatcttggcacggcgctgtactggatagccgccagtatcaatatcaaaccgggccatgattattatttttacatccgcagtgtgaacaccgttggcaaatcggcatttgtggaggctgttggccagccgagtgatgatgcatccggctatctgaattttttcaaaggagagatagggaaaacccatctggctcaggagttgtggacgcagattgataacggtcagcttgcgcctgacctggctgaaatcaggacgtccattacgggtgtcagcaatgaaatcacgcagaccgtcaataagaaactggaagaccagagtgcagcgatccagcagatacagaaggttcaggttgatacaaataataacctgaacagcatgtgggctgtgaagctgcagcagatgcaggacggacgcctttatatcgcgggtattggtgccggtgttgagaatactcctgacggtatgcagagtcaggtgctgctggcggcggacaggattgcgatgattaatcctgcgaatggcaacacaaagccgatgtttgttgggcagggcgatcagatattcatgaacgaagtgttcctgaaatatctgacggctcccaccattaccagcggtggcaatcccccaacgttttcactgacacctgatggtcgactttctgcgaaaaatgcggatatcagcggtaacgtgaacgcgaactccgggacgctcaacaacgtcacgattaatcagaactgtcggattctgggaaaactgtcagctaaccagattgaaggtgatattgtcaaaacggtgggaaaagcctttccgagaaatggcagttatgccagcggtacaataacggtcactgtgtacgatgaccaggcttttgaccgtcagatagtagtcccccccgttctgtttcgtgggggtaagcatgaaaacttcaacagcaacaaccaacagtcatactggtattcaacctgtaagctgcaggtactgaagaacggacaggaaatctttcagcaacccgcgacggatgtcagcagggtattttcatcagtcattgatatgcctgccggacacggccatgtcaccctgactttcaatgtttcttcatatggtgctaataactggacgccaacgaccagtatcagcgaccttcttgttgttgtgatgaagaaatctacagccggtatcagtatcagttgaattttataacccagatacgggcgccagaaatggcgccttttttatttgtggagtgaatatggcagtacagatttcaggcgtgctgaaagacggtgcaggaaaaccgatacagaactgcaccattcagctcaaagcaaaacgtaacagcaccacggttgtggtgaacacggtggcctcagaaaatccggatgaagccggacgttacagcatggatgtcgagtatggccagtacagcgttatcctgctggttgaaggttttccgccttcacatgccggggccatcaccgtgtatgaggattctaagccggggacattgaatgattttctgggcgctgcaacagaagatgatgttcgtccggaggcactgtatcgttttgaaaagatggtggaagaggtggcacgcaacgctgaagccgcctctcagagcgcagcggcagcaaagaaatcagaaacagcagcggcatcgtccaggaatgcggcgaaaacatcagagacgaatgcaggtaacagcgcgaaagcggcagcttcttcaaaaacagccgcacaaaacgcagcaacagcggcagaacgttcagagacaaatgcccgtgcgtcagaagaagcctccgcagacagtgaagaggcttcccgccgtaatgcagagtcagccgctgaaaatgccggagtcgccaccacaaaagcgcgggaggccgcagcagacgcaacaaaggccgggcagaaaaaggatgaggctctgtcggcagcgacacgggctgaaaaggcggcagaccgcgcagaagtcgcagcggaagtgactgcagagccctatgcgaatatagtgccgccgctgcctgatgtgtggataccgtttaacgattcactggatatgattgcgggtttttctccgggctataaaaaaatagctattggtgacgatgtggttcaggtcgccagtgataaacaggttaatttcagtcgcgcatcaacggcaacatatatcaacaaatctggcgaactgaaaacggcggaaattaatgagccgcgatttgagtgtgatggcctgcttattgagggacaaagaacgaactacatgctcaattcggaaagtccagccagctgggggaagtcatcaaacatggatgtgcccgaaaccgggacagatagttttggttttacttatggaaagtttgtctgcaacgattctctggttgggcaaacttcggctattaatatggcatcaattgctgcaacaaagtcagttgatgtctcaggcgataacaagtacgtgacaacctcatgccgttttaaaacagaacgacaggtaaggttacgtatacggtttgataagtatgatggtagtgcaacaacttttcttggcgatgcgtacattgatacgcaaacgcttgaaattaatatgacaggtggggctgccggcagaattacggcacgagtcaggaaggataagaccacaggctggatttttgcagaggcaacgattcaggcaattgatggtgagttaaaaataggctctcagatacagtattctcctgagcggggtggggcaacagtatctggtgactatatttatcttgccaccccacaagtagagaatgggccgtgtgtatcatcatttattatttcaggaggcagcgcaacgacaagagccagtgatttggttagtatccccaccagaaataatctttataagttaccatttacttttttacttgagattcataaaaactgggatattgcaccaaacgccgcaccccgcgtgtgggatatagcagcagccaataccgggcaatcagcaattgcagcaatcaacagaggtagtggtaagttatatatgagtctgtcaaacccttcaggcttgtatgttaatagtgcagcgacagatgtatttgcagagaaaaccacatttggatgtattgcaaaagctgatggtcactttcatgtggtgacaaatggtaaagcggttaatgaagtttattgtgaatataatggtgtgaccgctgataaaaatatccgatttggagggcagacgaatactggagaacgacatctgtttggccatattcgcaatttccgcatatggcataaagaattaaatgacaggcaattaaaagaggtcgtatgaaagatttaactttgaagtttcatgacaaactgcagtttaaggccttcctgtcatctcttgactgggaggaggatgaagacctccagaataaactgttagtcgatgaaattggtttcacctacacagaaacaggggtaacagaagagggagaacctgtctgtgtccggaatgacggttattttgtcaacattcgcattcttgatgacttgtttgatgtttctgtattctctgattatgtcgtggagctggaaacaccgcttcgggaatggagctgaaaggaggaaataatggatataagccccttacttcatgcgctttgtgctgtggctgcgcagatactggttggtctttttaccggaaactgggcttacggagcgatagccggttgtacgttcttcattgcgcgtgaacatacccaggcagaatatcgctggattgaaatgttcgggcatggcaagcgaatgaatatgccgtggtggggcggttttgatccgcgagcttgggatgtggcaagcctgatggattttgctgtgccggtggtggcgtgtctgctggtctggctgttggttaatcgtgggtgaaaaaaggtgagctgtatatgcaacggaggaagaaaccccgttgctggaagccaggaaaaagtatcgggtgttgctgtcctcggatgttgtgctaattgggtgataacagatcctgtgtatgggagtttccctttttgcgtgcgttgatgctggtaacggcaaacgtcatgatgaacaaaaccgcgaataagacgacaatcgtcggagctggtgcgctgtcgataaaaaaggacaaccagacaccagtcattgacactattaccgatatgccagtcgccagtaggagcgcaatatgaaagcgttgtgtcaggagtaccgcaatggcgccaggcgcaatgagcagagaaatggagagaatgatacctaccgctttcagcgtcgccacaatggtcagagagaccatgcacagcagcccataatgcagccatctcgtatgcaaaccgcttacctgcgcctgttgataatcaaagctgaacagcaaaaaatcccgccattttacgctaataacaagtgtaaccagcccggcaataatcatcgtctggattatatcgccgatggttatcccgagcatgtcgccgaaaagaatatggtcaagatgtacgtctggtttgactgcaatatacaagatcagacctgcggcaaacatgccagaaaaaacaatccccatcactgtatcttgcttgattcggctgttgtctttcaggtatcccgtcgccaccgcgcagaatactccggcgacgaatgcccctgtagccaaaggtaaccccagaatccaggcaagcacgattccaggaaaaaccgcatgactcatcgcgtcacccatcagtgcccaacctttcaggaccagaaagaccgacagcagcgcacagggtatggaaactaccagtgaaatcagcagtgcgtgactcataaaggtgaactgcagtggctccagtaataatgccatcatgagcgatcctccagcgccttatgcgcacgccgacgatttgccaaaagcccatgggtgggcgcaaagacaaatgctaaaagaaacagcagtgtctgcgccaccacgatgattccacctgtcgcgccgtccagaaagtaactgacccacgcgccgaggaaactagttacactgccaatagttacagcaatcatgagcaggcggggaaaacgatcggttaacaaccatgctgttgcaccgggagtcaccaccagacagatcaccagaaaggcaccaaccgtttgcagcgccgcaacggtcgaaaccgacagcagggtgaagaagatgagttttaatctgcccggatgcaatccaatagcacgggcgtgattctcgtcgaaaaaggtcaccataagatctttccatttgaaaaaaagcacgatgatcgagagaatgccaatgatagtgagttgcaggatatccgccggatcgattgccagaatattgcccaggacgatggtctgaatgttcacagatgtcgggttcaatgacaccataaacagccccaggccaaaaaaggacgagaagatcagaccgatgatggcatcttcttttaagcgggtgcgttggttaagaaacagcatgctgcccgcagccagtccgccggaaaagaaggctcccagagaaaacggaagccccagcatatatgcccccgcaacacccgggacaatagagtgcgacaacgcatcgccaatcagcgaccagccttttagcatcagatagcatgacaggaaagcgcagagaccgccgaccatcgccgagacccacatcgcattgagcatatattcatagctgaagggttccagtagcacgttcatctttcttccctctgcaccgctgacggtcgatgagccacaaaagggcgttcatcgtcagtaataatgctttcttccgagccgttaagtgtgacatggcgcagtacgccgctaaaagccagctctaggttctcggctgtaaaagtggtgtctgtcggcccgcttgccaggacggtgcctttgaccatgaccgtataatcgcaaaatgtcgtgacggatccgagattgtgtgttgagacaagcatcgttttgccttccgcgcgtaactccctcaacaggctgatgattttggcttcggttttcacatcaacgccagtaaaaggttcatccagcaggatcacatcaccctgctgtgcaatcgctctcgccagaaagacgcgtttcttttgtccaccggaaagctcgccgatttgtcgatggcgaaaattcaccatatcgacacgttccagcgcatcggtgacaatttgacgatccctctttttggcgatacgcaacatacccatatgcccatagcggcccatcatcaccacatcttccaccagtacaggaaatgaccagtcaacatcttctgactgagggacgtaggcaaccaggtttttctgtaacgcctgtcgcgtgggaatacccagaacagatatctttccgctggtcagacgcacaaatcccataatcgctttaaacaacgtcgattttccggaaccgtttaccccaaccagagcggcaatagatccacttggtactgtgaaggatgcatcgcgcagtgctgtgtgcccgttacgccaggtgacagtaacatcattaacgacaatgcctgcagattgcatcattatttctcccttttcccagctttaattccctgtaccagcgtactggtagtaaccttaagaaggtcgatatacgtcggtaccgggccgttttctgtgctcagggaatcgacatagagcacaccgccgtagtgtgcgccggtttcacgcgcaacctgacgcgctggtttatcggaaatcgtactctcgctaaagactgccgggatatgatttttcttaactatatcaacaaccttacgtacctgctgcggtgttccttgttgatcggcattaatcggccacagataaagctcttttagccccaaatcgcgtgcgagataagaaaaagccccttcactggtgaccatccatcgctgattctcagggagttccgtaatctgcttacgcaggggggcaagggtttgggtaatcttggctttataagtatcggcattgcgttggtaggtttgtgcatttgccggatcgtattttatcaacgcatcacgaatattatcgacgtaaatcagagcattatctggcgacatccatgcatgggggttaggtttgccctcatagggtccttcggtgatccctacaggcgtcacacccgaagagacaattacttctggaaccccattgagatgctggtaaaagcgttggaaccacaattccagattcataccattggcgagaatcagttgtgccccctgcgcacgtttaatatcgccaggggtaggctgatactcatgaatttctgcaccaggcttggttatggatgagacttctgcagcatctcccgccacgtttttggccatatccgcgatgatggtaaatgttgtaatgaccttgaatttttcagttgcacttgcctgaaatgcgatcgagcaggtgagtgcgaggccccccaagagcatggttactttttttatcgagtgcataatttagtacctatagtgagcaaaattagaacaaacatagcaacggctatgttttatagcacaacctatacaaaatgaaaatgattatcattagcggttttgaggcccaaaacagggattaggttgtttccggctggcgacgcgttattgaggaaaaaagtaaggcagctagtaggctttgaaataacgttttgcggttggctgatgcaatttcgagagtgcatgtattgaatgatttctagccgttactgattttcgtattttttgtatgggaggatttgcacctctccccaccgagcctccatgactttactccactgtctctagggctgctgtgtgccaggagcggaagcaggggggccagagactccttaaaagttgatagctcgttttgcagggagacttacacggtaagcgttattccgaagagcttaaaattgaagcagtcaaacgggttgttgagcgtgtttatgcgctgccatctgattaatcgacggaagcagttccgtttggtctatgatgcagttgtccggcaggcgctctgtgacgcaaaagaacgataggagtagcattgaagtgaacgaggttatgcttgtcttatattatcctctattttaaaaacatcagctggttgtgtaagagtttttattgttttatcttgttgactttgcttttatgaaaacagagtgattgatacaatgaaaaccttaagtgggaaagagtttaggaaattatttaatcgttatgagacaggattctatctaagtgagtttgaatacttaaaggactttgatcctttgtttcctgaatgcgtagggaaagaattaaagttgggttataaacgaaaagttgatgtatggtgcgaagaggatgctgcgctatatgcagaatttatagctacaaaagaaaggctgaaaagaggccggttaatcctaaaaataaaccaagtgtggtcgcgtgtatatcctgcttatatttatgcaattgaagaaagaataaatgtcagggcaaaggggagagagtcatttaagtatgaaactgtgcaagaaaaacaatgtaaactttccataatgttagatggtctgaaagaccttgaatgtgaaatagctatgatttcaagtgagtttgaaattgaaaaacactctatgcactatttttatatgatttttgatattgaacgctatataaatgactgcagttactttgttttttctgctgctaaagttgttaaaggcgtgattcaatgcattggttacattgacaaaaataacaaagcaagttgcgatgaattttattcaggcagctatgaatgcttggatgatgatcaggaaacactgaactatttaaatgaatcatgcgcagagggtatagacgctgataaagatctcatcaggaagaatgagttattagccttatccctgaaggaattgtatcaacttctcgtttcaaaaaaataacaagtaatacggcgagcgatatgacgtgccatgggatatccgcacccagcagcatgttgtctccacgatgtccgcagttcgctcataatagacattcactacagttatagtagaaggtatgcatgctgctgagtggggaaagtgtgaaagaaaagaagacagctgctttgtttgtcgtcacgtttatcttcattggctatgcaagtcgtaatacaaggcgggacaaaactgagacacataaggcctcgcaatggcttgcaaggccacacatgtattgagatgttaataaaatgtagacttgtaattttgatataaatggtagagaaaatctttccccaaaataaaaacgaacgtcaatgaaatcaaacggttgaataaagttgattttggctaatacaaagacaagaaaataatatttatgattaaatatcagcgagttgaatacataatttttatatactgctgcgccacatggggtgggttgaagcggctgacttaattgttaaaggtatggaaggcgcaatcaacgcgaagaccgtaacctatgacttcgaacgtctgatggaaggcgctaaactgctgaaatgttcagagtttggtgacgcgatcatcaagaacatgtaatctctacatgtgttaaatattgaaacgggcgtataacacgcccgttgtttttataaatatgttaaccgttataaaataacgtatcaaaagtcaagtgaacacatttcaaatatcaatttgatcgtattggtctggtgattatttatggggagcaataaaaagacagtattaatcatccatagggatagtctctgcacttttatttccattatgctaatgccttactgaattatgaagcattttttaagctcccaactttagctagattaatggtttattattttctacatcttcaatatataaaagcgtattatcaatggcgtagtaactgcgtttgttatgattaacatcagtaacccaccggaaaacgcctgcgcctgccagtgttgaacagtattcccgaaatgtagattttccgcgaatatgaagcaatgcggcctcttttattttagctgggttcttggtcgtactaacttttaacaggttcctggttcctcttaataacaaaaccgtgtcatcgtgagtaataattctgatgttatccgtagccagataataaatgtaatgtgcaatacggtgatgttttaattctgaataaaaccaggagaagttttgctcttttctcacttgctcaaacatcttttgaaaaacaacgacctgatccatcaggataataacctcttgttaggtgtgagactgcgtagtgtgcacgatcggttttaccacttcaatctggtctgtcctttggctgtgatatgtacaaagtgtgaaagggggattacctgaattctcccggtgggcattttgcaacggaccagctccgctacaaacgctggtgtgggttcagattataacattctgtctaaggggcgggataaaggtgaatttagggggcatgaaagatgactttataaccttgctcaccccagtgttgtaaaagttcgttttgccttctcgttggtgccatgcctgtccagacaatcaatgtttgcgttgggaacagttccgggcgcggcgattcaatgggatcagcaagaacagaaatgtgccatcctgacaatgataaacgccatgcttccagccacaatcgtgctctctcttcaacattccacgccatcagaatggcctctttaccgggcttacggcgcatttcgaaaagtaaggccgctgcgtattcaattaatgcgccgtcaaacatactgctcataatgcgggaggtgttgtgatcaagcacgagacgctggcgaacaggaaggtaaacatgattaatcaattgatctactgggtactctcgacccagtgaaataattcgcgcgcgtagtttggctggattagccatacgaagaattgacatcatctcttcttgcaggcggctccagtcatcttgcgtatcctggctggtagtttccagtaatgctttaactttgcctacaggaacgccattacttatccaacgcttgatctcttcgatgcgttgtatgtcttcttcatcaaagagtcggtgtccgccttcactgcgctgtggttttaacaaaccgtagcggcgttgccaggcccggagagtgacaggattaatcccgcaacgttcagcaacatcaccaatgctgtaataagccacaattcctccttgcggtcataaatctccgtcgcctctacacgacccaataatactttgtacaatatacgctgaaattgtacaaagtataaataagatttcagctaaattggatgaaacattatttttaatgtggattaaattaaaacataacgtattcattttcacgatgatttccagaaatcatgcgaaataatgtgctgaaaattattttttctccggccacgcaactgaagggataccattcaatttagctttggaaaacagatctccctgaaacatctcaattcctgcagattcaagccacatccactcttctggtgttgccacgcccatagcagagacttgaatttcaagtgatgtacagcatttcatgatcgcctgaataattgcctgccgtggtccgcttttatgaacattggtaatcaattcctgactgattttaattctgtcaggctggaagcgtgacaggagtaacaaaccagcaaaacctgcgccaaaatgatcaattgctacactgataccggccgcctttagcgatttaaccgcttcggcaaactcatcaaaccgagatatgacttcactttcagtaaattcaacgatgatttgttcaggtaccagagcattggcctttatttcatcaagtaaaaaagagactgcgtcaggtttgttaaccagggtcataggtaatagattgattgaaatcattttatcaccgagcttaagtgcgtgtgccatcgcaaatgcaagcgccttacttttgagatccgctgtgtagatttcctcgtctttacgctgcccaaccgctatagctgacgggctgtcttcatttttttgcacaatggcttcaaaagcgattatccgccgcgataaagggtcgacaataggatgaaaggcaaagtggtcgtttatatttgatgaaagggtacaagaatcaagttctttatcagatccgtcagcgataaaaagccaggagtcttcagcaggaatctcgaaataggttgattgttcagttgcaaggacaaaagtacgaaaaaattgtagcgctctgtcatcataagttagctgaaattttgatgtgcctttgtcgaatacggcctgtaaaacgtcatctcgctcgtgcaggcgtaaatcaaataattccattcctgctttgccaaaacggcgagcaggcgcgtaatcgcacaacagttcaacaatattatagtgccgtggatcctggcatatggcccgatatatcatttgaacctgttcttccggaccttccagaagctggaaaaaatgagaaccattaaacagtaagatccctgttacgtcagaccgcatgttcctgcgatttgctatcgaaaccatttcttcaatttttttgacaggttcgtcgccacgtatatggctacgataaataagggtggtaagcattaacaatccagggtaatgggcgaggcgagagtaagacggtaacagacatatcttcttgtgtctttcttttaataccaaaacataaccgtttctttacattgataaaaagtggaaaaggttgaagacggtttggcgaaaaaacctgtataggttgtcatttaaatgatgcaatatgttttatcgtaatgcattgttttatatgaattagcactaattgcgaaaaattaatttatcattctgtacacatatttcgtacaagtttgctattgttacctcacttaacattgattaacatttttaacagaggcgtagcatgcatcaaaattcagtgacttcagattctgcaggagcaatcactcgttactttgcaaaagctaacttgcctactcagcaggaaactctcggggaaattgtgactgagattttgaaagatggacgtaatctgagtcgaaagtcgctttgtgccaaacttctttgccggctggaacaagcgacaggggaagaggaacagaaacattataatgcactaattgggttgctttttgaataatgcaacagcctgattatttaacaggttagctatgaagtcgttatgaagacatctgataatgaaagtataaaatatgaaattactggccaggcggtgctccagatactgcgcatgaagataaatttttcgttgcagactcttattaagcaattactcgtaatgaaatcggctgaggaaaatactttccgacgagatttaattgacagcataattcgtgattttagcaacagtgatacaggagggccaaaccgaagaacagcgatagctgacaataaaagtatgttcactggtaagaaaataaacagaatacattaaaatttcataagtaagatgagaggttaccatgcttgaagatactactattcataatgcaatatctgataaagcgttatcaagttactttcgtagttcaggtaatttgttagaagaagagtctgctgtgttagggcaggctgtgaccaatttaatgctttcaggcgataatgttaataataaaaatattatcttaagtctgatacactccctggaaacaacaagtgatattctcaaagctgatgtgattagaaaaacactggaaatcgtgttgcgatacacagctgatgatatgtaacttttaattataaagtataagtttatagaaaactcattcatcttatttttgtctgtcgctttagactatacacagcataattttattggatcactattcctgcgaggctgacatgaataattcaatcccagagagatttatttttcaatgtgctttgtttaaaaatctcgagagggaggtgttcatgacacatggatatgttgatagtcatattattgctcaggctttacgcttgcgtttaaaagatgagaccagtgttattctttctgatctctatctgcaaatcttgcagtacattgaaatgcataagactacactaacggatatcattattaatgacagggaatctgtgctctcttaaaacttgagtaaggtttttgaataaacatcagctgtatcactatgctgatgcaaagtgagcatttcaggcgttatgctttcttaatatatccgcaatatcagagggcaaacaggaatggagagcgctcgttttccattcttgacgcctgatatcccgcctaatttgtttaattctgcctacattgtgctaaaaaattaataggctagatgaagttggagaaaattttatcttcggcgtggatatttgtgatgctctctaccatgctctctgtagacccctgcgcgagcgaatgaacgtctctttagcttctacagacttatcgataaaggctttgggattttgatatttattctgttaatcgcctgcgccgctgccttcctgcttgataggtatttcaataaaagcgcaacgcctgaagagatcctgcgacgggctataaataatggggagatcgtccctttttaccaacctgtggtaaatggtcgggaagggacattgcggggagttgaggtgttagcccgctggaaacaacctcacggtggatatatatcacccgcggcatttattccacttgctgaaaaatgcggattaatcgttccgcttacgcaaagcctgatgaatcaggttgccagacagatgaacgctatcgcgagtaaactgccggaaggttttcatattgggattaattttagcgcctcgcatattattttgccgacgtttgtcgacgagtgcttaaattaccgtgacagttttacccgccgcgatttaaaccttgttctggaagtcaccgagcgtgagccattaaatgttgatgaaagtctggttcagcggttgaacattctgcatgaaaatggttttgtcatcgcgctggatgatttcggtactggttactcagggctttcttatctgcatgacctgcatattgattatatcaaaattgatcacagtttcgttggccgcgtcaacgcagacccagcatcaacccgaattctggattgtgtattggatctggcgcgtaaactttcgatcagtatcgtcgctgaagatgtcgaaacgaaagaacaatttgactatctgaaccaaaataatatcacatttcagcagggttattatttctataaacctgttacatacatcgacctggtcaagattatcctttctaaaccgaaggtgaagattgtggttgagtgaaaattgatcagcaaggccatggtgcggtgtaattatagacagctaattagctcgttgcctcttgttactattgttcattcttttgtttgctataattgtgtgaaagttttgactggattgccattagtagcatgaacaatagtaataatctggattatttcactctctatatcatcttttccattgcatttatgctgatcactctcctggtcatccttattgcaaaacccagcaccgggctgggagaagtgcttgtgacgataaatttgcttaatgccctggtttggctggcgatcaatctggttaatcgattaagggaaagactcgtcagccacagggatcagcactaatctttcagtttctcactgccagtatgcggctgaatgggttgctggcagtgaacccctggatcattgaaggaaaggaattattgcacaaatagttgtcaaccctggtgttatcacagttgttttatatatcagtgaaataatttccatggcaactgttgataattttgatgtcgaagagttatttgttaaacaaaatagttaccccaaagtgatcaatgtcatgaaaataagctaaaaatgataatgctggcttatttatcatttaaatattgtcgctgtttatctatttaaatttcttgtgcttttgtttttatctttgccttccgttttggtaatctgaactcataggttatttgaccaggaatgtttgttaatccaatgaatggatggttaatctatgaaactgaaaaaactccccggatttagtttaggacttattgctctggcggtgggtaatgcatatgtaacacaattgttggatatttatagtataatttcctatataaccgatgaagaatcaccgattgaaatcaaaaataatacttctacaagtaatggggagtatctaatcacttaagacgaaagccatgctgtgaaagtggatgacggtgtaactggatatatacataatgccagtgtgatgactagtggtgatggatcttatggtatttctgttgatagccaaaacaaagtattatatataagcgatagcaatattaagacgctctgaaagcgtatctgacaaagaaaatggagggataacagccagcgcagtagtcagtgaatttggtggcaccatcgttatgaatggtgataattcagtcgagacgagggggcatattcagcgggacttttaagtcagattaatgattctgggactgtggaaaataacaccagtcttgaaaccacagataaaacgaacattgttacctatggggaaaatgcagtaggagttcttgcatgttcaagtcctggagagtctcgaacatgtgtcgatgctgtagatgatgaagtttgtgattctaacagttacgaagttattagccgtgctgatttaaaaatgaatggtggttccataacaactaatggtattaatagctatggtgcttatgctaatgggaaaaaagcatatattaatttagattatgtggtgcttgaaactgtggctgatggaagttatgcagttgctattcgacaaggtaacattgatataaaaaagttctattacaacaaatggcactaaagcccccattgcaaaaatatacaatggtagagagttatttttttccaatgtcacttcagaatcaacagaaacgcctacccccgtcctgcgacccgaagctggcagttacgtcgccaacctggcagccgctaacactctttttgttatgcgtctgaacgatcgtgcaggtgaaacgcgctatatcgatcctgtaactgaacaggagcgttcaagccgattttggctacgtcaaattggcgggcataatgcctggcgtgacagcaacggacagttgagaacgacctcggcacaggccatctggatgggcgtcgatcataatgtgcacacggaagccaatggctcacgtattgagaatgacgcaaataacaatatccagacccgacttggtttccacacctttattcgtactcaggagaaaaacagcggtccgcacggtgacgactttgaaccttttgttgaaatgaacgggatccataacagtaaagattttgctgtctcaataaacggtgtgaaagttgaacaagccggggcgcgtaatctgggggaaattaaacatggcgtaaatggcaatctgaatcctgcggccagcgtctggggtaatgtgggcgtgcagctgggtgataatggctacaatgacaacgcaatgatggtgggcctgaaatataagttctgatcccgccattagctaaaaaaccgcgtcgaattcatcgacgcggtaacatatgaaatattattttttgccgatagcacgcatggtgtcatcaattgccgtgatcaacagcatttgcggatctttagcgcaaacctgattcagtttttctaccactttggcgctcagttccggagattgctcaatttttaaatcacggctggcaacgctggcattacccattaccgcaacaatttctgcaacctgtgcgctgtcagtttttgccatttcgttggcttctgcgcaagtaatataggtttctgatggcaaaccgttcttaatattgtagtcctgcgcccaggtcattggtgcgaaaacaaacagacccgccagtaaagcaaattttttcatcatcattccttatttcattttacccagaattgcaccacccgtaccgccaatcacggcacctttaatcgccccttcgaggccattgccggtcagaacgccagtgacagcaccaacggcggcacccacttttgcacctttacgcgcatttttaccatcgcggcctttttctgttactgcaccaacaccagcgccaacagctgcacctttcagtacgccattaacaccattgccagtaagtaaaccaacgcctgcacctagcaatgcacctttcgtggtgcgattcatatccgccattgctggcgtggagcagaacaatgctgagataagcccgaaggcgagtatttttttcttcaacttagttgtccggtattaagtaagttgcacacacaataatttcgtcttcaattaagatctgcttaactaaagaacgctcgctattattcagataattcaaaatgagcgtgactgtgatgataggaattatgttttttacgggaatgagaataatctcaaataagaaataactcattgattgacaatatttttattcaagaagtgtcattggctgttaatacaatgttgtaaaggtaagataatctgatttatcaatattattgtgtgattgttatgtgagcagaagatattcattagcaacgattacattagtcattttattttgtggacggcctcattgtcgaaaaataagcgtacgacagtattatcagaacagagtgattttttatccaacaacacttcagcgcactgcgtttaaaaaatacctctttcttatacgggatatcatcatttcatcatgatgtctttgatgagcggtgaacacaatacatttgcgctgtctcttcaggatgaatcccctggtctggtgcctgcgggctgatgttgcagcagagctaaggtcacttagacgctactatcatttatccaatgcatggaatcgaaatcagtcgatacccgcagtatatatcgtgaactgggcgcaacgctgagttacaacatgcgtctggggaacggtatggaaattgaaccctggctgaaggcggctgtgcgcaaagaatttgtcgatgataatcgagtgaaagtgaatagtgacggtaattttgtcaatgatttgtcgggcagacgtggaatataccaggcaggtattaaagcctcattcagcagtacgttaagcgggcatctcggggtggggtatagccgtggtgccggtgtggagtccccgtggaatgcggtggtcggtgtgaactggtcgttctgaccatcaacgattaaactgcgtttcggcgctgtttttgtttaccgggtgctaaaagggaaaattctggggcaaaaaaaagcccgtcagttacggcgggaaacctcatcctatgggagaacaatgaataatgaaattgcggggttatcatctcccaggatacccatgctaacgataaggttatttactcaaccaggcgtaaacattttgttctgtgcgtgggaacagccttaaggtgtaaagggggagggggaaatagcaatgaatagtatcagcaagaatactcgccgctttaccacaacgtggatgagagggatgaaaaactcaaggcagagatgactctgccttgaagataaatgcgcttttacagggggcttatttcagctcttctgcttccggtaaggtcacgttcagctcaagaatagaaatatcgccatctttttgctcaagctgtacggttaccatctcaggatcaatttgtacatatttacaaatgacctcaagaatatctttacgcaactgcggcagataatgcggttctgcatcgctgcgacggcgttcagcaacaataatctgcaaccgttcttttgcaatgttggctgtgtttttcttccgcgagagaaagaaatcgagtaatgccataacttatcctccgaacaagcgtttgaggaagcctttcttctcttcttcaatgaagcggaaaggacgttcttctcccaacagacgttctacggtatctgcgtaggctttacccgcatcggcgttaatgtcgagaatgaccggttcaccctggttagaggcgcgcaatactgattgatcctctgggatcacgccgacgagtttgatgcgcaggatctccagcacatcttccatgctcagcatgtcacctctgcttacgcggcctgggttatagcgcgttaacagtaggtgctctttaatcggctcttcgccattttctgcgcggcgtgatttcgacgccagaatgcctaaaatacggtcagagtcgcgtactgaggagacttccgggttggtggtaataatggcttcgtctgcaaaatagagtgccattaacgcaccggtttcaatccctgccggggagtcacaaacgataaattcaaaatccatcgctttcagatcatcaagaactttggcgaccccttcacgggtgagggcatctttatcgcgagtttgcgatgccggaagaatatagagattttcagtacgtttatctttaattaacgcctggtttagcgttgcatcgccctgaatgacgttgacgaaatcgtaaacgacccggcgttcacaacccataatcaggtcgagattacgcaggccgatatcaaaatctatcacgacagttttctttcccttctgggccaaaccagtggcgatggccgcgctggaggttgtcttaccaacaccccctttgcccgaagtaacaacaataatgcgtgccatagaaattccttgttaaaaagggatcaatttaacggttgaacggtcaaagcgttttcgactaactgcagtcgtgccgctttgccataaaattctgctgggatttgatcactcagccagtattcacctgcgatggacaccagttccgccatcaggttcgtacaaaatatttgcgtttcccggtcaccacttgcccctgccagcgcacgaccgcgcatcatgccatagacatgaatgttaccatcggcaatcaattcggcccctgcgctaacgtggcttgtaacaatcagatcacattgtggagcataaatacgctgaccggaacgcactggggtatcaattaaacgcgtttttgtgaccggcgttgtattttgcgctggagcctgcggtgcgggagctggacgcggcgctttttcctttccttccgtcaggataggcagccccatcttttcaatttcggctttaagttgcgcatctttgcagccacttacgccaataacccgcaaaccggttgccgaaaccgccttatgcatcgctgaccagtttaccggggcttccagtgcactgacgttgagtacaacgggggcatgttttaaaaatgcgggggcctgagcgattttgtcttccagcgcctgatggataaccttaggttctgcctcatgcagatgaaccacagataaagtgaagctactgcctttaagctcgattggcgtgtttgacatcctggccttactcaattagctattaatcatcgccagcgcgcgatgatgttccgaagactataaggcatgttatagtctggattatattgaggcaagtcaccctcccatttattcagagtaaaagtctattctgtgataaatggcgctgattcatagcttaaaaaatacccttgtcaatcaacccattgccgtcgtacttttgattgttcttatttacgcttcctttttccgcaccctaatcgtgacagcatcttcagacctgtttaaatatccagtgttgaggcgagtgtattttttcaccacgccaggctttcttaactttccattttttgcagcatcattaaagaacagatacccgttatcttaatatccgccacagaattgctctatcatagaaaccgcagaagacgtctgatacttctgtcaggtcatcgtaactcgtccaggtcagcggttttgattacggattgatgatgaaatgagcataagtgttgtacggttggattatcaggatgtgctatgaatatgatgcgtattttttatatcggattgtcaggtgtggggatgatgttctcatcaatggcgtctggaaatgacgctggcgggcttcaatctcctgcgtgtggcgttgtttgcgacccgtatatttgtgtgagttcagatggcatttccccagagttaacaaggaaatatctcggcgaaaaagccgctgaaaacttacaatcattacaaggctacgatcccagcgaatttacattctctaacggtgtattttgcgatgttaaagaaaaattatgtcgtgatgatcgttattttggtgtggatggtaagcggagtggaaaaatcaatcaaaccaccacaaagatgttatttatgtgtcgtgagtgatgtcttgtttacattatgttctattcggcattgtctgctattcgtcattaacctattaagcgacagagaggagtggggcgttaacgtttatgacggggagagtccccgtcggttgatatttacttaatttgaatatcgacgttatattttttagttttgtttttacgggcgtcgtttcgggtttgcagcactcgcagctcatatttgccagaagcagggagtgagtattgtccgtgactatcgagttctggggaatatctggataaatcaacagaatcatcgattcctggcccgaagaggtaagtatcagcgccttcattagagatactcacgtgcactttctgaccttttttggcatagaaggtatatgtatcgtaatcgtatccctttatttcgccggagtactgagcgctgctatggccttttctgaactcaacattgacattcttacccgcagcaaagctcgtggaggttagcagtgcaagcaacaatacagccttactgatgcccttaattttcattggtagtctcctgttcagaatgagtacgatgaactgttataatataacaatccttcacgggagaattccagtggctttcctgtgttcggttaaatcccggcgcggcatttttgccggggggattacttataaagggggcatggactgaacaaaccgtagaaatctacagctggctggcttgtggcgcgggtttcattgatgttagcttatgccaaaacctggcatcttaaagagtaaaagtatgttttgtgtgatttatcgaagcagcaagcgtgaccagacctatttatatgtcgaaaaaaaagacgatttttcgcgtgttcctgaggaactgatgaaaggttttggtcagcctcagttagcgatgattcttccgctggatgggcggaagaaactggtcaatgccgatattgaaaaggttaaacaggcattaaccgagcaaggttactatttgcagttaccgccaccacccgaagatttgctgaagcaacatctttccgtcatggggcagaaaacagacgacacgaacaaataaccgatatccggcggtggcattatctttgtcggcgcgggttttcatatccacgataaggtgaggggaacgttatgtatcaacatcacaactggcaaggtgcgctgctggattatccggtgagtaaagtagtctgtgttggcagtaactatgccaaacatattaaagagatgggcagcgcagtacccgaagagccagtgctgtttattaaaccagaaacggcactgtgcgatctgcggcagccattggcgatcccatccgatttcggttcagttcatcatgaagtcgaactggcggtgttgattggcgcgacgctgcgtcaggctacggaagagcatgtccgcaaagccattgccggttacggcgtggcgctcgatctgacattgcgtgatgttcagggaaaaatgaagaaagccgggcagccgtgggaaaaggccaaagcgtttgataactcttgtccgctttccgggtttattcccgcggcggagtttaccggcgacccgcaaaatacaacgctgggcctgagcgtaaacggcgagcaacgccagcaaggtacgactgcggacatgatccataaaatcgttccgctgatcgcttatatgagcaagttttttaccctcaaggccggtgacgttgtgctgacaggcacgcctgatggtgtcggcccgttgcaaagcggtgatgagctgacagtcactttcgatgggcattctttgacaactcgcgttttgtaatactttttgccgcctgaaagcggcggcaaaacttgcatcgctgtgccagactggttataaggtgcgttttaacgtaatggcggaacacctgatgagcgatgtacctttctggcaaagtaaaaccctggacgaaatgagcgatgcggaatgggagtcgttgtgtgatggttgcggtcagtgttgcctgcataaactgatggatgaagacaccgacgaaatctacttcactaacgtcgcctgtcgccagctcaatattaaaacctgtcaatgtcggaactacgaacgtcgtttcgagtttgaacccgactgcattaaattaacccgtgaaaatctgccaacattcgaatggctgccaatgacctgcgcttatcgtttgctggcggaaggtaaaggtttacctgcgtggcatccgctacttactggttcgaaagcggcaatgcatggtgaacgtatctctgtgcgtcatatcgcagtgaaagaatcagaagtgattgactggcaggatcatatcttaaataaacctgactgggcgcagtgataaatttaatagatgttgatgggggctttcttaatatacgtctggatgctcgccattttgtagccctgtttttgaaagcgctctgtcataatgagagttacccgatactttattatcaacaggtaactctcaatctttaaaaaacgtctgtatttttaaatgtgataaattttataccttgagtacatagagagaataatcgcttatcagacttcaggtatctcaaagagtgtcttcttaccgtgtcttttctgatactcattacaggtgttaatcattttttgggccgcttcttttagtaaagaaagcattaaatcatcataatcaacgtagaatctggttgtttcagtttccgtttttatcaccccgatggcggctatttcggtagttaatttcaatttggcggcatcgatatctttattcgcttgtttaaccgtgttagacagggtggtaaagaaactcagcgcagattttaacttgttcttcaattctggaatcagtttcccttcaactacgcccgcagcaatagaacacagtttcttgatgccgtcatccagtaccttaatgagaatgcctttctgggcgaatgcttcgattctattttaaaccaggtgatatttttcctttctgctggatggacgctgtcgcaagaaggccgcgtgagcacaggataagagaacgaaaaatcagcagtctatgcagcgacaaatattgatagcctgaatcagtattgatctgctgacaagaacagactactgtatataaaaacagtatagcttcaggcagattattatgttgtttatcaagcctgcggatctccgcgaaattgtgacttttccgctatttagcgatcttgttcagtgtggctttccttcaccggccgcagattacgttgaacagcgcatcgatctgaatcaactgttgatccagcatcccagcgcgacttatttcgtcaaagcaagtggtgattctatgattgatggtgggattagtgacggtgatttactgattgtcgatagcgctattaccgccagccatggtgatattgtcatcgctgctgttgacggtgagtttacggtgaaaaaattgcaactacgcccgacggtacagcttactcctatgaacagtgcgtactcgcccattaccatcagtagcgaagatacgctggatgtctttggtgtggtgatccacgtcgttaaggcgatgcgctgatgtttgccctctgtgatgtaaacgcgttttatgccagctgtgagacggtgtttcgccctgatttatggggtaaaccggtggttgtgctatcgaataatgacggttgcgttatcgcccgaaacgctgaggcaaaggcgctgggcgttaaaatgggcgatccctggttcaaacaaaaagatctgtttcgtcgctgtggcgtggtttgctttagcagcaattatgagctttacgcagacatgagtaatcgggtgatgtcgacgctggaagaactatcgccccgcgtcgagatttacagtattgatgaggcattctgcgatctgacaggtgtgcataattgtcgcgatctgactgattttggcagagaaattcgcgcaacggtgctacaacgtacccatcttactgttggtgtggggatcgcccagaccaaaacgctggctaagcttgccaattatgcggcaaaaaaatggcagcggcagacgggcggggtggtggatttatcaaatctggaacgccagcgtaaattaatgtctgctctccccgtggatgaagtctgggggattggacggcggatcagcaaaaaactggacgcgatggggatcaaaaccgttctcgatttggcggattcagatatccggtttatccgtaaacattttaatgtcgtgctcgaaagaacggtgcgtgaactgcgcggtgaaccctgtttgcaactggaagagtttgcaccgacgaagcaggaaattatctgttcccgctcgtttggtgaacgcatcacggattatccgtcgatgcggcaggccatttgtagttacgctgcccgggcggcggaaaaacttcgcagcgagcatcaatattgtcggtttatctccacgtttattaagacgtcaccatttgcgttcaatgaaccttattacggcaatagcgcatcggtaaaactgctgacgcccactcaggacagcagggatatcattaacgccgctacgcgatctctggatgccatctggcaagcgggccatcgctaccaaaaagcgggcgtgatgctgggggatttcttcagtcagggagtcgcgcagctcaatttattcgatgacaacgcaccgcgccccgggagtgagcaattgatggcggtaatggatacgctgaatgctaaagagggcagaggaacactctattttgccgggcaggggatccagcaacaatggcagatgaagcgtgccatgctttcaccatgttatacaacgcgaagttctgatttactgcgggtcaaataaacatagcggcaggaaaaagcgctcccgcaggagcgccgaatggattagcgaccgaacaggtcacgttttttcgctttaaacggctgggaaatcaccaccagcaccgcgacaatcaggtaagcgataaaaataccgagcagccactgcggcatttccagacctaaaaattcccactgacgctcggcgcaatcgccagaggcgacaaacacttgcggcacccatttatccagcggcagccattccgggaaacgagccataaaatcacaggtcgcaaacggcgaaggatagagctgaagcatggtgtgctcgtaagttaactgcacaccgcggaacgcactatacaaccagataaccatcgctacataacgcagcggagttttcggggcgatcgcgccaatcagcgcagcacccagaacgccgaataacgcgcagcgttcataaatacagagcacgcaaggtttcagtaacatcacatgctggaaccacagcgccgtcagttccagtgccagagcagtaaacgccatcaacagccatgcgccccggccttgtgaacattggttcaaaaatcgcaacataatcatttccctgcaatatgcatagagtgcgcagtttaaaccaattcattcgctgcgccaccaggaggcagcaaaaataggacgcaattggacaattatcgggcgaaaaggcaaaccgggcatttatatgcccggtaagttgttatcaaagcgttgctatccagcccatttgcataaaccattcggttacaggagcaagcgtaaactcgacgcagagcagcccgacgagtgtcaggacgagggtgtaaggcagggccatccacaccatgcggccataagagagacgaatcaatggcgcgagtgcagaggtcagcaggaacaggaacgcagcctgaccgttcggcgtagcgacggagggcagattggtaccggtattaatggcgaccgccagcagctcatattgcttcaacgtgatagcgccactttccattgccgctttcgcttcgttgatataaatcgtccccacgaagacgttatccgaaatggatgacagcagaccgttgaaaatatagaacaacgacagctgagcatgttcagatgcctgcaacacaaactgaataatcggcgaaaacagttgttggtcgataatcaccgcgactactgagaaaaacaccgtcaacagtgcggtgaatggcagagattcggtgaaggctttaccgatagcatgttcatcggtaacaccggtcaatgatgtcgccagaataatgaccgacaaaccaatcaaaccgacttctgccagatgcagtgccagcgcagtcaccagccagacgccgataatcgcctggacaatcagacggattttatcctgacgggtacgctggttgcggctttgatcgtcaaactgttgcagcacttcgcggactttctccggcagcgtttcaccgtagccaaaccaacgcagcttctctaccagcaggcaggttaacaggccacaaatcagaaccgggacggtcaccggcgacatgcgcaggaagaaatcgccaaaatgccagccagccgctttagcgatgatcaggttttgtggttcgcccaccatggtcatcacgccgcctaatgcggtgccgacaccggcatgcatcatcagactacgcagaaagccacggaactgttccagaaccactttgtaatgcttgtcgatatgactatcgtcttgcaggtcggtatcttcagtacgggaagaggctacgcggtgataaataccataaaaaccgactgcaacgctgatcaccaccgccacgacggttaaggcatcgaggaacgcggagaggaacgccgccgccacgcaaaaagagagcgacagcagcattttggagcgaatacttaacagcaaacgggtaaatatgaacagcaacagctgtttcataaaatagatacccgccaccataaacatcagtaacagcaagacttcaagatttgccgccacctcttcacggacgtgttccgcgctggtcatgccgatgaatactgcttcgatagccaacaaaccaccggggagcagcgggtagcatttcagggccatagccagagtgaaaataaattccgctaccagcaaccagccagcgacgaaagggctgatgaggaaaattaacggatttacgattaagaaaatgatgagggcgagtttgtaccagtcgggggactggcccaaaaaattgcgccatagtgcgcggccccaggagatctccatgatggtttcccttaccttagaaataatcaatgatgtttttatgtttaaacgcaaagcttaacggtcagacaggagtgaggcaagtcttgatagtcaaggggaaagagatgcagaaaatgaagccttgatcccttttttcttctttttgtcttctatcagcgtagttagccctctggtatgatgagtccaactttgttttgctgtgttatggaaatctcactatggtcattaaggcgcaaagcccggcgggtttcgcggaagagtacattattgaaagtatctggaataaccgcttccctcccgggactattttgcccgcagaacgtgaactttcagaattaattggcgtaacgcgtactacgttacgtgaagtgttacaacgtctggcacgagatggctggttgaccattcaacacggcaagccgacgaaggtgaataatttctgggaaacctctggtttaaatatccttgaaacactggcgcgactggaccacgaaagtgtgccgcagcttattgataatttgctgtcggtgcgtaccaatatttcaactatttttattcgcaccgcgtttcgtcagcatcccgataaagcgcaggaagtgctggcaaccgctaatgaagtggccgatcacgccgacgcctttgccgagctggattacaacattttccgcggcctggcgtttgcttccggcaacccgatttacggtctgatccttaacgggatgaaagggctgtatacgcgcattggtcgtcactatttcgccaatccggaagcgcgcagtctggcgctgggcttctatcacaaactgtcggcgttgtgcagtgaaggcgcacacgatcaggtatatgaaacagtgcgtcgctatgggcatgagagtggcgagatttggcaccggatgcagaaaaatctgccgggtgatttagccattcagggacgataatccttccagacggatgacaaacgtataattgcctgatgcgctacgcttatcaggcctacgtgtttttttgcaatgtattgaatttgcgatactttgtaggccggataaggcatttacgccgcatccggcaaaaatgagtcctcctcaaacgaggaggactatttacagatttcccattctcggcgggcaacgttccagcaactcgacgctgccgtcttcgttttgctgttccagcatcacatcaaatccccacaggcgatgcacatgcttcagcacttctttgcgcccccgatccagcggtgcgcgattatgtgggatgtaacgcagcgtcagcgaacggtcgccgcgcaaatccacgttccagatctgaatattcggctccagattacttaagttatattgcgacgataaccggttacggatttcccgataaccttcttcattatgaatagcggaaatctccagataattatgccgatcatcatccagcacggtgaagaagcggaaatcacgcatcactttcggtgacaggaactggctgataaaactctcatctttgaaatcacgcatcgcgaaatgcagcgtttccagccagtcggaaccggcgatatccgggaaccagtatttgtcttcttccgttggcgactgacaaatccgtttaatatcctggaacatggcaaacccgagggcatacgggttgatgccgctgtaccacgggctgttatagggcggctggaagaccacattggtgtggctgtgcaagaactccagcataaaacgttccgttactttcccttcatcatacagatggttaaggatggtgtagtgccagaaggtcgcccagccttcgttcatcacctgagtctgtttttgcggataaaaatactggctcaccttacgcacaatacgcaggatttcacgctgccatgattccagcagtggcgcatttttctccataaaatagagcaggttttcttgtggttcggacggatagcggcgcgcttcagcaaccgttttctcttcctcgcgcttcggcagggtacgccagagcatattgacctgactttgcagatactcttcgcgactcttctgccgggctttctcttcttgcagcgagattttttgcgggcgtttgtaccggtccacgccgtagttcatcagcgcgtggcacgagtccagaagccgttctacttcatcaacgccataacgttcttcgcactcggtaatatatttacgggcaaaaatcagataatcgacaatcgaactggcgtcggtccagctacggaataagtaattgtttttgaagaaagagttatgcccatagcaggcatgagccatcaccagcgcttgcatggtaatggtgttctcttccatcaggtaagcgatacacgggttagagttaatgacgatttcataggccagtccttgctgaccgtgcttatacagccgttcagtctcgataaactttttaccgaatgaccagtgcggatagttaattggcatgccgacgctggagtaggcatccatcatctgttctgaggttatcacttcaatctggtgcgggtaggtatccagccggtagagtttcgccacccggtctatctctgccagataaacatccagcaggtcgaacgtccagtcgggtccatcgctcaaacgtgtggtgtccttattcatagaatcgatcgtcgccatacgcgcacctcattgttgtcggcgctctctgtgtggagcacctcatttcaagcatagaacacctgttaaaaaccgcgtcgccggagaatttttttctttgcgatttcttattatcagagtgccactaatccgcttctgaacggaattttatgctggataaaaagggcgttcagcaggagatactaaagacgccatattgccgcagagtcagggagatgtgagccagctcaccataaaaaagccgtatgttgaataatattttcaactgagttatcaagatgtaattagattattattcttttactgtatctaccgttatcggagtggctatgcgagttgtcatactgggaagtggtgtggtaggcgttgccagcgcctggtacttaaatcaggcaggacatgaggtcaccgtcattgatcgggagccgggggccgccctggaaaccagtgccgcgaatgccgggcaaatctcccccggatatgctgcaccgtgggcggcaccaggtgtgcctttaaaagcgattaaatggatgttccagcgccatgcgccgctggcggttcgtctcgacggtacgcagttccagttgaaatggatgtggcaaatgttacgtaactgcgacaccagccactatatggaaaacaaagggcggatggtgcgtctggcggaatacagccgtgattgcctgaaagcattgcgcgccgaaaccaatattcagtatgaagggcgtcagggtgggacgctgcaactgttccgtactgaacaacagtatgaaaacgcgacccgcgatatcgccgtgctggaagatgctggcgtaccgtatcagctgctggaatccagccgcctggcggaagtggagcccgcgctggcagaagtggcgcacaaactgacgggcggcctgcaactgcccaatgatgaaaccggagactgccagctgtttacccagaatctggcgcggatggcggagcaggcgggggttaaattccgctttaatacgcccgttgaccaactgctttgcgacggcgagcaaatttacggcgtgaagtgtggtgatgaagtgattaaggccgatgcgtatgtgatggcgtttggttcttactcgacggcgatgctcaaaggcattgttgatattccggtgtatccgctgaaaggctactcgctgactattccgattgcgcaggaagatggtgcgccggtgtctactatccttgatgaaacctacaaaatcgccattacccgtttcgataaccgcattcgtgttggcggaatggcggaaattgttggctttaacaccgagctgttgcaaccgcgtcgtgaaacgctggagatggtggttcgcgatctctatccacgcggcggtcatgttgagcaggcgactttctggactggcctgcgcccgatgacgccagacggcacgccggttgtcgggcgtacacgctttaaaaatctgtggctgaataccggtcacggcacgctcggctggacgatggcttgcggttccggtcagttgttaagcgatctgctctcggggcgcacgccagcgatcccgtatgaagatctaagcgtagcgcgctacagccgtggatttacgccatcacgcccgggccatttacatggcgcacacagctaaggaaacgagatgacccgtccgatacaggccagcctcgatctgcaggcattaaaacagaatctgtccattgtccgccaggccgcgccgtacgcgcgcgtctggtcggtggtaaaagcgaacgcttacgggcacggtattgagcgtatctggagcgcgctcggggccaccgatggctttgcattgcttaatctggaagaggcaataacgttacgtgagcgcggctggaaaggaccgatcctgatgctggaaggatttttccatgctcaggatctggagatttatgaccagcaccgcctgaccacctgcgtacacagcaactggcagctcaaagcactgcaaaatgcgcggctaaaagcaccgttggatatttatcttaaagtgaacagtgggatgaatcggttgggcttccagcccgatcgcgtgcttaccgtctggcagcagttgcgggcgatggcgaatgttggcgaaatgaccctgatgtcgcattttgccgaagcggaacatcctgatggaatttccagcgcgatggcgcgtattgagcaggcggcggaagggctggagtgtcggcgttcgttggccaattcggcggcgactctgtggcaccaggaagcgcattttgactgggttcggcctggtattattttgtatggcgcttcgccgtccggtcagtggcgtgatatcgccaataccggattacgtccggtgatgacgctaagcagtgagattattggtgtccagacgctaaaagcgggcgagcgtgtgggctacggcggtcgctatactgcgcgcgatgaacagcgaatcggcattgtcgccgcaggatacgccgacggttatccgcgccacgcgcctaccggtacccctgttttagtggacggcgttctcaccatgacggtggggacagtctcgatggatatgctggcggtcgatttaacgccttgcccgcaagcgggtattggtacgccagttgagctgtggggcaaggagatcaaaattgatgatgtcgccgccgctgccggaacggtaggctatgagttgatgtgcgcgctggcgttacgcgtcccggttgtgacggtgtaacttgttatcgctggatgcgaccagcgtcgtatccagcgttataaaacacattaaacttaagattcggcttcttcctccgctacccgaacaccaatcttcaacacttcattatcttctttctcggccaccgtccagatcatcccggcaaactctacctggtcaccgacaaccggtgctgcgcctaacaactgctggacgatttcacccagcgtttgctgcttatcgcgatattctcgcccgtcttccagaccatatatcagcgccacatcagcatatttggcgctggcttcgagaatgaagtcaccaaagaagcgttgatccagcgcgaccggcggcgactggctgaacagtttaccgagcgccgggagatcgcgttcccgaccaattacacacaacacatcgccttcgcgcagtcgggtgctgccggtgggatgaagcaactggttatcacgaaacagtgccgcaatacgcgtctcttttggcatatgcaaatcacgcagtgccgcgcccacgcaccatttatcggcactcaattgataaacaaactgctcccacggattttccggatgaatatccaggccaacgcgtgacaccggacgtcccactggcggaacgaccactttggcttttttcgccgcccacgagagtgatgttccctgcaatagcagtgaaaccaggaccacaaagaaggcgacattaaagaacagtcgcgcattctccagccccgccatcatcgggaacacagccagaataatcggcaccgcgccgcgtaatcctacccagctgataaacacgcgctcacgcagattgaagccacggaacggtagcaatccggcaaataccgaaagaggacgggcgaagaaaatcatccatgcggacaaaatgagcgccggaatggcaatgggcagcagatcgcttgggttaaccaatagccccagcaccaggaacatggcgatttgcgccagccaggcgaggccgtcgaaattttgcaggatgccgtagcggttgcgaatcggccgattacccagcagaaaaccgcacagataaacagccagaataccgctgccttccagcgccgtggttaaagcaaaaattaaaataccgccgcttaatgccagcaatggatataatccggcgggcagggcgatgcgattaatcatttgcagcagtaaataaccaccgccaagcccgatgacaatcccgaggccaaattgctgcagaatatcgaccacgaacatccaactgacactgctttcatgttgctggatcatcgcaatcagggtaatcgtcagaaagaccgccattggatcattactgccggattcaatttccagcgtcgagccaacacgttcgttaagccccttaccacccagcagagaaaagaccgctgcagcatcggtggagccgacgatagcgccgattaataatccttcaatcaaatcaagattaaacagccacgccgccatcatgccggttaaaccagaggtgataagcacgcccagcgtcgccagcgacagtgccggtcctaacgccacacgaaaggagctggcctgagtacgcatcccgccgtcgagcaaaataatcgccagcgccaggttacttaccatgtaggcgaaggggtaattatcaaacgggataccgccgacgccatcaacccccgccagcatgccgatcgccagaaaaataaccagaatgggaatgccaagacgggaagaaaatgaactaagtaatatactgctggtgacaaggatggatcctaagatgaaaaggctaattattgttgtggcatccaacggtcggttactcctgattacgctgtctcttatataaaccctaccatattagcggcagagacagcgttttacttagccctgaagcgtgatttttttacattttaagaacaggatgaccgctaatcgtcaactgggtgccttcctgggtgttattaagaatggcatgtgcgcccaacggcagtgtaaccgtgcgttgttcatgaccaaaatcgaggccggtaatgagtggaatcgacaggcgggaacgcaaaaacgcgtacactgactccaggttgtaacctgcgtcataatcattaggcgtgctgccgctaaagctaccgagaataatcgccttctgacgtggcaaaattccagcatgatagagctgcaacagcatacgttcgacgcggaaagggtgctcgttaatatcttccagcaccagaataccgttctcaatttttggcatccacggtgtaccaatcagtgaaatcagcatcgcaagattgcctccccacagcgtgccttcggtctgacatgtcgggccttccccttgccattcaatggtgaacgttttattgcgtaacgccagccagaagtggtgctcggtaaaggcatttagttcatccgcgccaaagtttgctaccagcatggggccgctaaaggtgatgacattgccttgcgccagaagaccgcactgaatggcggtaaaatcgctatgtccgcaaatgagtaacgggtcatgttgttggcgagccaccagtgcctgccagtcaatatctgccagtaaacgactggcaccgtaaccgccgcgtacagacagcacgatggtgttgggggtagtcagtctggcaagagaattgagatcttccagacgctccgtttccgtacccgcaaaacgctcacaacgacgggcaataacctcgacgttattgacctgatgccccgcgtcggtaaggcgctggataccacgcagcgcggcgtgctgtttaatgcagtaacccgatggggcaattaagtgaaacagagacatggcaattccttgctgacaacagaaacgaaatgtatatcatgccgcttaggtgtgccgttgtcacctcaacggcgattccaggctataaggacagaagaagtgaaattgagatggtttgcctttttgattgtgttattagcgggttgttcatcaaagcatgactatacgaacccgccgtggaacgcgaaagttccggtgcaacgtgcgatgcagtggatgccaataagccagaaagccggtgcagcctggggcgtcgatccacaattgatcacggcgattatcgctatcgaatcgggtggtaatccgaacgcggtgagtaaatcgaatgccattggtttgatgcagataaaagcttcaacctccggacgtgatgtatatcgtcgtatgggctggagcggtgagccgacgaccagcgagctgaaaaatccggagcgtaatatttcaatgggggcggcttacctgaatattctggaaaccggcccgctggcaggcattgaagatccgaaggtactgcaatatgcgctggtggtgtcatacgctaacggggcaggtgcgctgctacggactttctcgtcagatcggaaaaaggcgatcagcaaaatcaacgatctggatgctgatgagttcctcgatcacgtagcgcgaaatcatcctgcgccgcaggctccgcgctatatctacaaacttgagcaggcactggacgcgatgtaaatcagtcgcgcacattgtccgcttttttccgggcttctcgctcgagagagaaaataatccgctgtaattgccgctccaccgtcgggctgacgttaagaaaacggaagctcagacggggagtggtgatggtttcatttttgccatcaatcactttgcgctcgctgatggagattaactgggcgtcaaagtgaaaaacaccccattgccccatgttgacttcaatctgagcgaagcgcatgccttcgtgtaattcggcaggctttgctgtttccagtaatgcgcccatgccgcctaacgacaaatcatacaggcggaaacgtaacgtactgttatccgccagtttggtctggcaaaaataaggcggatggagtggggcggtgatgcggaaatatcggcgtcgttgtacaaaccataaggtgggaggcggtacggtaataaatgccggaagcagcaagtattcactctgctgtagttgttcaacagtaaactcgactttcgcaccctgagtttcggcggtaatggtaatgtgctgcgcctttagcacggcgatgttgtcttcggcctggctgccgaaatccagcaccagtttatccggagttattgccagtattttgctgatcagctgcccgccattccagctgatacgcaaaggaattgcggctttgttcaaatcgcgtaacacgcccaggacggctaacggattttgtttcaggaactgctcatggtaatgactcacgcggaaaaactcctgactgacaaactgtctttggtttatcggtcgcagttaacaaaacttaatacaaatgcgcgaatattttttacatgttgttcttaaatcagccgacatacgcccagcatcgatcccgcccttgcctatacttagagcgttgacgtaagcatttcttgcgtccgattcatcgaaacgagggcctgaacatgggaattattgcctggattatttttggcctgatagccggtattatcgccaagctaatcatgccggggcgtgatggtggtggatttttcctgacctgtattcttgggatagtcggtgcggtggtcggcggctggctggcgaccatgtttggcattggcggctccatcagcggttttaatttgcacagcttcctggtggcggtggtgggcgctatcctggtgctgggcgtattccgcctcctgcgaagagaataagattttcataaggcggatagcgatacagatgccgctatccgctttcacatcagaacgtatactcgataccagcccagaaattgcgaccttcttcaataaacccttcactgtaggcatatttggtatcaaacaggttattgaccgacgcattaacgctgaagccatgacctaaggtgtaatcggctcgaatgtgggtcaccgcaaaaccggcggctttttgtgaaccgtcactgttgctgtagctggaggaacgcgcctcttccgacagcgttacgcttaacggctcccacggtttgagagtcatccatgcggtcattgtctgcgttggcagatcggttatcttgccgatgtctttgcgtttggcatcagcgtggatcagggcgtagctcaatcctacatccagtatattgctgattttccccttaataccggcatccagaccgctgtaatccaccgtgccgctgttctgattttgaatggtatcggcatcgatattgtgcgagaggatggcatcactcacccggttatagtaaacgctgacctcaaatccccagtcgtgcgtgaaggcaccattccaggttaaatccaccccgcgcgcgcgttccggcttgagctgcgggttaacaatcgctatctggttatacgcaggtttggacgtggtatagcgttctttcagcgtcggaaagcgtgtgcggtcatagtacgaaagcgccagcgtgtcttcattggcaaagtggtatttccccatcacctgccagttaaaagctgactgattgttgtcgtcataatgggtgatactgccatctttctcatgttttttcgcttctacgctatcgcgccagtcatagctgattccagccacgacatcgacattatcggcagcagcccattgatattcactggcgagcgaccaggtacgatcttcatagcgatcgtaagcggcgtgcggcgcacctttttcccggtgtacgtcatctttccagttaacggcaaacgacagcagatcgttttcacgcacatcggctgccagttgtaacccggcaccgtcgctgtaatcggaataatggctgtagctgccttttttatttttcaaatcagccagcgagttgtacatcattagcgtattttcaaaggtgtcgtgatacagccgacttttcagggtaaaacgatcgtttagttgggtcgttccctgataataaaaactttctttgtcatactctggccactgccagtagcgtgatttctgaccactatttccactgtatggcgggttatctttttcaccatcctgcttaatgtaagtcaatgtgtattcatcgttttcgcgtggtgtaaaaccgagcttcacaatgccgcgtttatcatcagccgatgaattaatcatcttgccgtgtttgcctgcaatatcattatttacaccatgcggcaggccgagaaaatcctgctttagctggctaccgctgacttgcaaataccccagatcgctgctggcggcaaatgaagcatgcatatcgtaggcattgtcctggctacggctccatccctgacgatatcccagactggcttccagcggtttagtcggcttctgggtggtgatattaatggctccgcccatctgattaggcccctgaagcagcgacgaataccctttggaaacttcaactgcccccaaattgttggtcagaatccgcgccagatcgaggttgccgtcatagggaacataaatgggcacaccgtcgaaatagaccggcacctgacgactatcaaagccacgaactttgacctgttcttcgttgcggctacctgacttttgcagcaccacgccggggacgacacttaatgcctgagcgacattctgtttatccagggccttcatggtgggttgatcgagaacggtggttgtcgtcgatgataccggactggaccatacggtcagcgtgtcactctcctgagccgctacggactgctgggtaaaggcaagtgataatactgtgcagagataacgttttttgagtctcatagaataaattccgtttaacaaagaattaaatagaggctgcgggttgcagactgactttaatgtcagcaggtgccgcgtaataaggcgcggaggtaataaaaaggcgaatgccgcagtcgaggtaatttttgagtgttgtcagattaattccgccggtcagagccagcgtgcagtggggagccagcgacggtgctatttgcgcaatttcagttgcctgttgcggactaaatttgtcgagctgaagtacgtctggttgcgcgcgtaacgcggcgattgcctctttcggcgtgtcggcttcaacaactattttcttctcgggtgcgtggcgacgtaactgattgattgcgcctgaccagtcctgattgtcatgaagaaaatggcggtggttggcaaacaataatatggtttccgcacatccggcacgatgaatcagtcctccggcagccagaattgcctgcgaggccagtaagcgggtgcccggaattgcttttcgggtgcaggcgatattgccatcagggtaacgttcacgaagtaacgccagcatttgagcgagataatcagaaacaccgcaactccactccagcacattctggactgccttccatccctgatgaagtgctgcggcattaccttgcgcacggattagccgctgacccgcgttcgcttgtgaaccgtcgctgaccgcgtcatcaatagttaatcccagcgtagttaacatcttacacgcgacagaaattccgctgacgcagccgccctgacggagaaaaaactctatatagccatgctggtgtccaatatttaatgctcgcgtggtcaggtcaccgccctggatatcttccagaagtaacgcatcgatttgtgcctgagaaaggaaaatcatcgcagtgtctcctgcggtacgctatcccaccagatgagcgcccagtcgcggctggcaggggcgagggcacgagcatcttgttgttgataccagcgatataaccgctcacgctcatcgtcgttaagcgcgcccagactccagctgacgttctgctcaaaacgttcccaggtgctgttatcctgttggcaattttgtccacggataaaatcaacgtgagcataaattcccatctgatacaggacgttgagcgcaaagatatagttgggtaattcgatcacttcccgaccagccgcccgctgaatggctggagagacgaacgaggtgctgaccagatgagtcgtatagacgcgaagccgtgcctgattattcagtttgctcattgcctggcgcatatcagccaccagagtggagcgggaagccacggcaatatcgcagcgtggcaggtcactccagtcctcttcccaggcgcgctggatccagtggacattgtctgcctttagcgcggcggcgcgacgggcggcaacgttcagcatcccctgactgtaatcaacgccataaatcgtcgtgagtttgtccgccagcgccagcgatacggtacccggtccgcagcccatatcgaataaggtttgcgcgccttgcaggtcaatttttgaggtcagttgttgcaggtagctgtccgtaggcgaggcgcaattttccgccattttttccgcccgttgatcccagtgatccggcgttttttctgtgcgatgggccagcctgagttgctgaaggtaaaggtctgcaaaatcaatatcgtcaatgagcatgatttttccttagtgcttaattgcagagaggtgatggtgaatctggtcggcagaaacccggtacagggcagccagttttttcgttgttaactgttcggtcggtaagccttgtgttactcgtccatctggctctacctggataatgctgtcggcaatggcgtttgcatggagcggatgatgagtcgacattaacattgtcatgccgttatttttgagctgcgccagcgtgtccagaagttggatctgatgaccgaaatcgaggctggaggcaggctcatccagtaataacaagcgcggttgctggacgagtgcacgggcgattaaagccagctgacgttcaccgccgctaagcgtattccagcgtcgtgtcgccagatgcaaaatgcccagcttttccagttgctccgttgctttcaggcgttcttgcttaccgggaacggaaaaagcgcctatggtgggggccaggcccatcaacaccatatccagcacactaaaagcaaaaatgccgtcgtgcgcctgcggcacccaggcaatagcctgcgcgcgctggcgatggctgagtgtctgcacagggaggctatccagtaagatctcgccttttaataacggtataacgccaagaatggagcgcatgagtgtggttttgccgcaaccattggctcctaacagacaacaaattgttccttgcgacagggtgaaggacacgtcgcgtagcaccggatggcgggagtaacccagagacgcatgacggacggcaagcaaagtcactggcgacctccgcgtaacaacaaaaacaggaaaaacggtgcgccaacaaaagcggtcagaatgccaagtgggatttctgttgttccaatgctgcgtgccagcgtatcggtaagcaggagcagaatcgcgccagtacacattgccatgggcaacagctgctgatggttatgaccggtcaacaagcgggcaatgtgcggaacgaccaggccgacccaaccaattatgcctgctattgctaccgtgctggcggtgatgagtgtggcgcagacaatcaatccaaagcgcagacgtgtcacgttcagtcccagcgaacgggcttcgtcgtcggaaagtgtgagtaaattcatgcgccagcggagaaaaaacaggggcaaggagcctatgagaatgatcggtgcagcatagcagagatcgcgtaaggtcacggtggacagcccccccagcaaccagaaggtaattgacggtaactgggtgtaaggatcggccagcgtttttattagcgatatccccgctccgcacaacgtgcctaatgcaatacctaccagcaccagggttaagatcggagcgtggcgggtcacccgacgcgtaatcaaccagacgcccgcgaccaccatcagcccgccgcaaaatgcgtacagctggatgtaaacaatggataatccgcacaggattgccgcgcaggcaccaagtccggcaccggcggagacgcctaaaatatccggtgacactaagggattacggaacattccctgataggtggttccggcccctgccagcgccgcgcccagaaacagcgcagcaagaatacgcggcacgcggatttgccagaagacaatttgttcttgcacaggaacattttcttgacgaagaatgagcgccagcagttgctgcatatcgagatgataagccccacttacggcggcaaaagtgatactgatagctgccagcagcaaaatacatccgtttacggttctcattagctcgccaccaatttttgatagtcggcgtcactgagtgaacaatgccagaacagttgggcgtaatgctgcatgtcacttttaaactggcgattgatggcgggatccagccaggcgtgaagtctgcgtaatcccagaagacggttgattcccggcggggcatccagccagccaaagggcaggccacttaaaaataagatgcgttgttccgcaaccgctttcacgccctgccagagaggatcacgacgaataaaatctgcagtaacggcctcctgaaccagaataatatccggctgccagcgcaggagattttccatggaaacctgtgtcagaccgtggcgatcggctatttgcgcgacgttatgcaaacctaataattccgccgcctcggtatgcaacgaaccctgtaagcccgtttccagccctcgaggaccgcgcgcagcataaaagctgaggttagcggcgggtgaggtggcgaatgcctgagcttcaccaacgaagcggctggcgagattggcttgttctgcggcgcggtgctcttcgcctaacgttttgccaagcgttgttaactgttctgctgattgttccagtttcccgttaagcaataaccagggtatttgtgtctgttcgctaacctgccgtgcctgggagatccaggtttcatccgtattgccgcaatcaacgaccaaatcgggatgtaacgccataagcccttccagcgagagtgtgctggcgcgcccggcgagtcgtcccagcctggggaactggcgaatgtgctctggcaatggaattaatgcctgacgggcaaaatcaaaagaggaaaaaccgaccattttttctggcgcgacagccagcaatagtaaatcggcgggcgcgcctgcgctgacgatgcgtgtaatgttttgggcttcgggaagcgtcagtgaggcccagaatttgactgattgtgcaaaggacggcagatgatgcaggaacaatgtcgacgcaagaatctgtgtaaacctccgtctggttagtgacataagttatatcctgataataaaaaccgctatatatttacatatatatcgaaaaaaatcatgtttgatgtcaaaatttgtctaaagagacagaatgatttgcttgttgcttaaataacactttgttccacaagaaaattgtcagggagaatggcggagtggcgaaaaatataaatagaggtgtaatgattaacaaattgataaaataaaattaaaatcttctctgataaaagaaaataaaggcatagaccgtagaatggggggcatttcgtggcgaaaaaagagcaatgccaattttatgcacataatggcattgctcgatatacagcaaagttaaggcgtaggttccgcctctttttgttttaccggctgtgttgttgactcactgagtggacgcgtcgccggaacattgtcacacggttgctctttcgggcagatcaaatccagcattttcagcgtcacgccattggtccagccaaagccatcctgtaatggatattcgccaccgccgccccctgttccggtggcgctgacatcatatttttccaccagctttttctcccggtcataggtgtgctgaacattggtcaggaagtgccagctaatgtccatcgccacctctttttgcccgtagttttgtaatccttctgtcgcgacccactgcaacggtgcccagccgtttggcgcatcccattgttgtccacttttcaccgacgtggtgttcaggccgccgggttgcagcagatgtgttttcgtcgccgtcgccattttgctggcgcgatctttcgctgccgcattgacgtacagcgggaacagggcggccgcggttaactgattgcgcactttatgacttttcaggtcgtaatcggcataccagccttgttgatcgttccacaggtatttttcgatccctttttgacgggcattcgccagcgtttcgtactggtttgccatcgcgttatctccggcagctttgctggcgcgggcgaggattttttccattttaaacatcaggctgttcagatcgaccggtacgatgctggtggtgcgtaaggtatttaactgctgcggattgtccatccagcgtgagctgaaatcccagccagacgcagcggcagagcgcaggtcgcggtaaatttcagtggcaggtcgattcggattgcttttggcagtggcaatatcttccacccatgactctggtcgtggcgtatcgcgatcgtcccagtagcggttgagaagggtaccatcctgaagttttacaacgcgtttttcctgttgtccggcttgcaggttttcaacaccgtccatccagtaagcatattctttttgcatttgcggcaggtattgtttcaacgcggcgtcgccttcatgctgcgccagtaactctaccatcagggcaaagaagggcggctgcgagcggcttaaatagtaactgcggttgccgttgggaatatgaccgtaagtgtctatttcatgagcaaaattggctaccatatccgcgactttatcccagtgaccgctttcggcaagtcctaacatggtgaagtaactgtcccagtaatatacctcgcgaaaacgtccgccgggcacgacataaggttttggcagcggtaatagagaatcccatttttcggtgttttcggtagaacgcgttaataccggccaaagtccgtcaatatgttcgcgcagtgattgcccctctggcggaacatatttctcgccctctttcggcagggtgaaattgacgttaacgaaatggcgtagatcaaatccgctctggttttgctgcatccgataatcagcaaggatcatcagcggatcgctgttcggcacggcatcggcaaaggttttttggtccggaaaaagtttggcgttttgcacatcattaaacagcggccctaataaaatatcaggcggttgtggtgttaccgatgtttcttctgcctgcaccgatagcgcagcgaaacacaaaaagatgcaggctggaattaacgccattttttgcgggcgagaaggtgcgggggatttcatcagtcattctcctttggcgaaaccgaataaaacggtattcaagtatcagaaaaccttagttcaggatcgcactagctgcatgatcgaaatcacattctgcgaactgacagacattttagaaaagggaattaaagagataaataacggcgaaatagagtgataaaataacatctgtttattagtcagccagcgacgttgggtttgcgattagcgaagaaaaatcatcataatttggtgaaaaatataacaggtagttaaaaacatcagtgcagagtaaattgccggatgacatcagaatgatgccatccgaacggtggtttaaccctgatggttgaaacgttgcgttttaacgtccagcgttagcgtttcttctggttgtatcgcatacagtttctcaccctgctggcaaatccagccaattcccagttcacgggcgattagggcactgtgggatagcggacttccggcgctaaggcagataccttttacaaccgctggatccagttgcagtactgtggagggataaatgttctccgccagtagaatagttggcgagttaaactgcgggagttcttctttcgtttgggtcaggtggaccagggtgcgatgcagaagatcgtccacatcgatatagcgagcctgtagatattcatcatccagctgttggtattgctggctaagttctttaagaacttgctgccaggcatattccgccgtgcaatgttcatgctgaaggagttcgcttgccgccgcctgcagttccggatcatctaacagtgtatggtgaccagaaaagattgcggcaatatcgtcaagcccactggtttctgctttcgctgttaacgtcatcagatctaataacgtgaagtcaatggcctggcgtaatcgttcttgttcttcttccacggtcagggttgattttgcctgtaccgtacataaaacaggttgataataaaaggctttacccgaaacaggcggaacgggacgcagagtaggtggagcaacttcctccgtttcaccaaagttatcttcagccagctgacggaaagcgatcagtgcctcttcagcttctggtcctttcgcaatcaggcgcagcgtatcgttatagcgaacttgtagtaacgcaatctggttaatactctccggtgtaacgcatttgccgtttttctccagcaacatatcggcattaaatgtcgataaggtataaaccagccgggaggccggacgtacatgcaggccgttacggttttttatgaccaccgacagagaacgggcttcttcatcgtacggaggacatgtgccagagatttcagtgtcagaggacggtaaacccagttgttcacgtttggcttccagcgcatgcatggcgtcaaagataactttgtcgatatccgcccccgaggccgcgctgaccgttgctgccagtgtaccttcgaccaacggcgcagcacacaaacgtacttttgcggcgatctcgggagccagcaattccagcgcagtttcagcactcaataatgcgctacccatatccatcatgaccagcacatggtcggcatcggcaacagattcgatggcctccatcactttgacggcatcggtaccaatgggattttgtggatcgtcaattcccgcggcaatggcgattttacaattatcactcattaacatctgacgggctaattcaccgacaccttctcccagtcggctgctatgtgaaactatgaccaggtttaccatcaccaattccttactcttttgcggctaacgccaacatttgcatcataaacatcaccgaggtcgcgccgggatcctggtgaccaatactgcgttcaccgagataactggcgcggcctttgcgggcttgcatcgtaatcgtactttgtgcagcggattcggcgatgctactggcagcgtcgagcgccgccggaacagggagattttgctcgcaggactgacgtaacgattccaccaccggcacccacacatcacacatggttttatcgccaggttcggctttcccgcgactgattacgccgtccgcgccatcgcggaacatctgataaagctcttccagcgtcaggctttgccgtgcctgggttgtctgtgcggcgcggataaagaaggtaccgaacagcggaccactggcacctccgacgctggaaagtagcgtcatgccggtattcttgagaatgaaaccgatatctttatctgcgatagcagggagtttttccaccactttgctaaagcctcgattcatatttagcccgtggtcagcgtcgccaatctcgcgatccagtccagtaagatactcgctctcggtgctgaaaatatcgccacaacgagtgagccagttaacaatttgagttctgctcagtgacattgctttctccttatttaccccagttaagggccggggtgtggacaggggcgtcccagagtgccagcgtttcgtcatcaactttcagtaaggtgattgagaaaccggtcatatccagtgaggtgcagtacgcgccaattaaattacgttcgatagtcaatcccgcttgctggcaacgtgtggtcaggcggttatagacgccgtacagctcagaaagcggagttgcgccaagattgttaaccagcgcaatcacccgatcgccagactggagcggttgtttggtttgtggttcttcctgccagctgccttgttgataatcccagaaacgcaaagtgcgatggtatgagccattttccagcagggtgtcgaacatttcatcgacggtttgatcaagggaagagaaggggcggcggtcaatacctggctcaccatgaatgccgacgccaaactccatctcattatccgccagggtaaaagaaggtttgcccgcggcaggaacggtacaggcaccgagagcgatacctattgaatggccttgattattcaacttacgccccagttccgcacaggcgtccagtgagtcgccacgctccgccgctgcacctacgagtttttcaattaatacggtgttggcaacgccgcgccgcccggcggtataaagactgtcttttactgcaacgtcgtcatcaatgaccacagtggtcacttttacgccgctatcgtgcagtaactcggttgctgtttcgaagttaagaatatcgccggtgtaatttttgataatcaacagtacaccttcgccgccatcaatttgcatggcgcattcaaagattttatcgggcgtcggtgaggtgaaaatttcgcccggacaggccccagaaagcatcccctgaccgatataaccacaatgcatcggctcgtgtccgctgccgccacccgacagcagggcgacttttcctgcaacgggggcatcagctcgggtgacatacaccggatcctgatgcagtgtcagcgatggatgcgccttcgctagtcctgccagttgttcgtccagtacgtcttgcacatcattgatcaattttttcattattttgctccagcaattacggtagggcatggatgatgttcaacgacacggcgaccactgactgccgatgaatccattgtgcatcaggcaagggaaaagaaaattagccaaattaggtttcatagtgaaacatatgctttaatgaatgttccatattgaaacttttacgtgtattaatacttaaaattgcgagccggaacaccttttgtcataagggatgcgggatatgagtggcgcttttaacaacgatggtcggggcatatctcccttaattgcaacctcctgggagagatgcaataagctgatgaaacgggagacatggaacgtaccacaccaggcccagggcgtgacatttgcttctatttatcggcgtaagaaagcgatgctgacgctcgggcaggctgcgctggaagatgcctgggaatatatggcaccgcgagagtgtgcgttgcttatcctcgatgaaaccgcctgcattctcagccgtaatggcgatccgcaaaccttgcagcagctaagtgtactgggattcaatgacggcacgtattgcgccgagggaattattggtacttgtgcgctatcgttagcggctatctctggtcaggccgtgaaaacgatggccgatcaacatttcaaacaggcactctggaactgggccttttgcgcaacgccgttgtttgacagcaagggccgattgacgggaacaatagcgctggcgtgtccggttgagcaaactaccgcagctgatttgccgttgacgttggcaatcgcacgcgaggtcggaaatttactgctgacggacagtttgctcgctgaaactaaccgtcatttaaatcaacttaatgccctgttagaaagtatggatgatggcgtgattagctgggacgagcagggtaatttgcaatttatcaatgcccaggcggcgcgggtcttgcgccttgacgcgacggcaagtcagggacgagcaatcactgaactcttaacgttacccgccgtattgcaacaagcaataaaacagtcacatccgctcaaacacgtagaagccacctttgaaagtcagcatcagtttattgatgcggtgataacccttaaaccgataatagaaacgcagggaaccagctttattttattgctccatcctgtggaacagatgcggcagttaatgaccagtcaattaggaaaagtcagccataccttcgctcatatgccacaggacgatccgcaaacccgccgcttgattcattttggtcgccaggcggcacgcagtagctttcctgtcctgctttgtggagaagagggcgtgggcaaggcactgctaagtcaggcaattcataatgaaagcgagcgtgcagcggggccttatatcgccgtcaattgtgagttatatggtgatgcggcgctggcggaagaatttattggtggcgatcgcacggatagtgaaaatggccgtctgagtcggctggaactggcgcacggcggcacgctgtttcttgaaaagattgaatatctggcggtggagttacagtctgccttgcttcaggttatcaagcagggggttatcacgcgactggatgcgcggcgtttaatacccattgatgtcaaagtgattgccacaacgaccgcggacctcgcaatgctggtggaacaaaatcgttttagtcgccagctgtattacgcgctgcatgcatttgaaattaccatcccgccactgcgtatgcggcgtggcagcattccggcgctggtgaataacaaattacgcagccttgaaaaacgcttctctacgcggctgaaaattgatgacgatgccctcgctcgcctggtttcctgtgcatggcctggcaacgattttgaactttacagcgtcatcgagaatcttgctctgagtagtgataatgggcgcattcgcgtcagtgatttgccggaacatctgtttaccgagcaggcgacagatgatgtcagcgccacccgcctttccaccagtctgtcatttgcggaagttgaaaaagaggcaattattaacgcagcccaggtcacaggcggtcgcattcaggaaatgtcggctttacttgggatcggccgcactacgctgtggcggaaaatgaagcaacatggcattgatgcagggcagtttaagcgccgtggatagcgggagagtatgtactttcccgctatgaattgctaattaatagcgaccatgactgccgtgatttggtccaccatttgaaggtggcattggcttacctgagggcgcaggaccacgagggccatcgctgtggcggtgatgatggtggggaacacaagcactcaacaggcttgcaaagacaattgctaacaggctgaaggtaaatgtttttttcatgacaaactcttgaacggttaatgcactgtgattgttatcacataaaagctgcattgttaatattgtcaggagtctgattatgagttttggtaactcagaattgaaagaagacgcgtagcaggcgtaaaaaagccattacgtgcaactcacataatggctcgttattaaccgctagggtagtattagcggaattagacgttgaacaggaagttcatcacatcgccatctttaacgatgtaatctttgccttctgcacgcattttgcctgcttctttcgcgccttgttcacctttgtaagtgatgaaatcttcaaacgagatggtttgtgcacggataaagcctttttcaaaatcagtatggattttgcccgctgcctgcggcgcggttgcaccaaccggaatggtccatgcacgcacttctttcaccccagcggtgaagtaagtttgcaggttcagcagcttataaccggcacggatcacacggttcaggcccggctcttccagcccaagctcctgcataaactcgtcacgctcttcgtcgtccagttcggcaatgtctgcttcaacagcagcacaaaccggaactacaacagaaccttctttcgctgcgatttcacgcacctggtcaagatacgggttgttttcaaaaccgtcttcgttgacgttggcgatgtacattgttggttttagcgtcaggaagctcaggtaacgaacagccgctttctcttcagcgcttaaatccagcgcacgcagcatacctgcgttttccagctggggcaggcatttttccagtaccgccagctcggctttcgcgtctttatcgccacctttggctttcttctgtacgcgatgaatcgcacgttcacaggtgtcgagatccgccagcgccagttcggtgttgataacttcaatatcatccgccgggttaactttgccggaaacgtgaatgatgttgtcattttcaaagcagcgaacaacgtgaccgatcgcttcggtttcacggatgttggtcaggaactggttacccagaccttcgcctttcgatgcgccttttaccagaccggcgatatcgacaaattccatggtcgtgggaagtgtacgctgcggttttacgatttcagccagttgatccaggcgagggtcaggcattggtacgacgcccgtgttcggctcgatggtgcagaatggaaagttggccgcttcaataccggctttggtcagcgcgttgaacagggtagatttcccgacgttgggcaaaccgacgataccgcatttgaatcccatgatttaaatcaccttaatatcttaataatcaacctgttattgctaacagattgcagaaatggaaataactttgcctattatacacggcactcggcaaaaatgccgcagacaacgacttattgcgctttaaaggcgtgcaatcggttcgttgctttggtcaagccatctgtaaaccacatttcagtacaacgcgccgcttcgtcgatggcttcatcaattaacttctgttcactaacaggcggtttgcctaacacaaaaccgacaactttatttttatcgcccggatgaccgattccgatgcgtaaacggtgaaagttagggttattacccaatttactgatgatgtctttcagtccattgtgaccaccatgaccgccacccaacttaaatttggcgacgccaggaggcagatccagttcgtcgtgggccaccagaatttcgtccggattaatgcggaaaaaactggccatcgccgcaacggctttgccgctgagattcataaatgtagtcgggactaacaggcggacatcttcgcctccaagggtgactcgcgaagtataaccaaagaatttagcctcttcgcgcagcggagcgcgcaatcgctctgccagtaagtcaacgaaccaggcaccagcattatgtcgcgttgcggcgtattcagcaccggggttcgccaggccgacaatcaatttaatcgtcacgtttttttgtcctgagtgtgtacataactggcgcgtagtttactggttgcggccccgcttgacaaaaaactgcgtatcaaatgcagataatgcaattattgcctgagtggactattagaaagtcaaggtgttcaggcgtttatttgtaaagttttgttgaaataagggttgtaattgtgatcacacccgcacataacctacagggtgttgtctatactttacacataaggaagaggggtattccctgttacaacccagaaagttccggaggtgacatatgaaacgcaaaaacgcttcgttactcggtaacgtgctcatggggttgggtctggtggtaatggtggtcggcgtggggtattcaatcctcaaccagttaccacagtttaatatgccccagtatttcgcacatggtgctgtgctaagtattttcgtcggtgcgattctctggctggcgggtgcccgtgttggcgggcatgaacaggtgtgcgaccgttactggtgggttcgccactatgacaaacgttgccgccgtagcgacaatcgccgtcatagctaacaaataatgcagtttgctgaccagtcagtttgcgctgactggtcaatctcgtacttataaatccgccatcgccgcgcgacgattcgggaagaatgcgaggcgtcccgggatcggttgaatgcctgcgcgagccatagtgcgcagtggctggaattccaggttgcacacgcgcagttcacatccttcgggcagacgcttcacaaaacgctggaacgcatcaagaccaccagcatcaagtaccggaacggcatcccacttcagaatcacaatccgtttgccttcaagacgtgactccaggtccgtgaataagccttcagcggcagcaaaaaacagcgggccaataacgcgcagaaccaggacatcgtctggaacgtctacgactaccggtgccaggcgagtcatacgtgcgatacgacgcataaacagcagcgatgccagcacgatccccacgctgatggcaataaccatatcgaacagcacggtcagcgacatgcacagcagcatgacgatgatgtcatctttcggtgcatgacgcagcaagtcgaccactttgtgcgcttcactcatgttccacgccaccatcaacagcagggctgccatggcggaaagcggcagccaggagagcagcggtgccagtaccagcagggcaagaataaccagaatagagtggatcaccgccgagataggggaagttgccccggcacggacgttagcggcagaacgcgcgatggcagctgtagcggtaataccaccaaagaacggagcgataatattccccaatccctgtccaaccagttcgctgttcgccttgtgttttgtcccggtcataccatccagcaccacggcgcagagcagagattcgattgcgccgagcattgccattgagaatgccgcaggcagcagtgtgcgaatagaatcccaggttagcgtgaattctgaattaggcagatcccacggcagcaccagttgcggcagcagttgcggaataccgttaccctgagaaccatcggccaggacgtagtggaattgcgaaccgatggtagcaacatgtccgccgagcaggttaacaatccccatcaccgcgcaaccagccagcaaggccggaaggtggccgggtaaacgtatgcccagacgcggccagaaaaccagaatgccaagcgtcacaatgccaatggctgcatcacccacattaatggtcggcagcgccataaataatgcgccgactttttgtagataatgttccgggacatgggccatttgcagaccgagaaaatctttaatctgcatggtaccgatggtgatcccgatacccgaggtgaaacctaaggtgacggaaaccggaatatactcaatcaggcgaccaaagcgtgccagccccatcagaatcaaaaagattcccgacagcaaggtcgcaaccagcagtcctgccagtccaaactgttgcgaaacgggatagagaattaccacaaatgccgcagtcggaccggaaacgctaaagcgtgacccccccgtcagagcaatgacaatccccgcaacagctgcggtatataaaccgtactggggggccacaccactaccaatagccaacgccatcgccagcgggatagcaataatcccgacggttatcccggcaatcaggtcacgggtaaaccgtgcggcagtatatttttctttccagcaagcgtcgatcagagcgcggaaaggcatcacatgtgaggaaaatattttgttcacaataatgtttcatccgtgagcgcatcatctgtcaactaaatggcaggtgaaggaggcataggtcatacaaatggatattacagacaaaaaaacccgccgcagcgggtctttgagccgggttcgattagtgttcgaacatggcagagatcgattcttcgttgctgatacgacgaatcgcttcggccagcatacctgacagggtcagagtacgcacgttcggcagtgatttgatttcatcgctcagcggaatggtatcgcagacaacgacttcatcaattacagagttacgcaggttgttcgccgcgttgccagagaagatcgggtgagtcgcgtacgcaaatacacgtttagcaccacgttctttcagagcttcagcagctttacacagcgtaccgccagtgtcgatcatatcatcgaccagtacgcagtcacgacctgcaacgtcaccgatgatatgcatcacctgggaaacgttcgcacgcggacgacgtttgtcgatgattgccatatcggtatcgttcagcagcttagcgatagcgcgggcacgcacaacgccgccgatgtccggagaaaccacaattgggttatccagattcagctgcagcatgtcttccagcaggatcgggctaccaaatacgttatcaaccggaacgtcgaagaaaccctgaatctgttcagcgtgcagatccactgtcagcacacggtcaacaccgacgctggagaggaagtctgcaaccactttcgcagtgattggtacacgagcggaacggacgcgacggtcctggcgcgcatagccaaagtaggggataacagcggtgatacgacctgcggaagcacgacgcagggcatcaaccataacgactaattccatcaggttgtcgttagtaggggcacaagtggactggatgatgaaaatatcaccaccgcgtacattttcattaatttgtacactgacttcgccgtcgctaaagcgacctacagcggcgtcgccgagtgaagtgtacaggcggttggcaatacgttgtgctagttccggggtggcgttaccagcaaaaagcttcatatcaggcacgagaagaacctcaggcatgcgtccattggtggaaagaatctgccgaaaactgtgcgggccaggcatgattctttccaggcggtgtattaaagagcgcgatgcaacgtctggaacaaggtgacgttgtcaccgaaactcagcttgcccggcttaaagcatggctctgtgcaatggggaaagattaacgcctttcgccacaaagccattgagccattccggggcttgctctagcacctggcgggcttcagactctgtatcaaattcagcaaagacacaggcccctgtcccagtcaggcgcgacggggcgtattctaacagccaggaaagcaccgcatcaacctcgcgaaaacgttttcttgcgataacctcgcaatcattgctgaattcacattttagcaacgtttctattgacctttttggcgtattgcgcgggagttcaggatctttaaaaatcaccggtgttggaatacttacaccagggtgcgccaccagataccacttctctggcggatccaccggcattagtatttcaccaacgccttcggcaaacgcggcatgaccacgaacaaagacaggaacatctgcgcccagcgtcagccccatttccgccagctcatccatgcttagcccgcattgccagagatgatttaacgccaccagaaccgtcgcggcattggatgaaccaccgccgagaccgccgcccatcggcaaacgcttgtcaatgctgatattcgcaccgcttcccgtcgaaagacgcccgctgtctgccgcagttttcatcaacaacctcgctgcgcgaacgatcaggttatcttcatgttccacgccttcaacgggcgttaacagacgaatatccccatcgtcacgaagctcaatgctgatggtgtcgccgtaatcaagaaactgaaacagcgtttgcagcgtgtggtaaccatccgcacgctgaccggtaatgtataaaaacagattaagttttgccggagagggccactgtgtccgcattatttcactatccagttatccatttttaacttgatgcgttgaccaccgtcggtgagttccatattggctggcatcgcaggttgagtttttgtgtcataaccaccgtaaacaactttccagtttttgccattctggctgtaggtgatttcactcaggcggtactggtcgtcaagtttgtagtcagtcgcatcacccggtaaacctaaaatccactggcgcaagctgttgagcggaattggcattccggtcaatttgccaatcatctcttcggcgtcatcggaggtataacgctgacctttattgtcgactaactgcacgttacccggttgagcattcagctccagttccgtgctgcccaatgggttagtcagcagcagacggtagcgatcctggccagtttgctgccagaagaaacgggcgtacactttttgttggtcagaaatataagcgaacgcgccgcgagtttgatactgattaagattgcgcacgtcttgctgatgctgacgccattgtggcgaatccgggcttttgcctgggcctttgggtgtggtaatagaacaggcagtgagcacgagggctgctagcggtagcaggcggataaagcgaaaatcgggcaggggcataataatgacaagtccttgagatacattgcagttataacccttaatgctagcgttaccgttagccatcgtctatgttcacgttgtcttaattgccagaatctaacggctttcggcaattactccaaaagggggcgctctcttttattgatcttacgcatcctgtatgatgcaagcagactaaccctatcaacgttggtattatttcccgcagacatgacccttttagcactcggtatcaaccataaaacggcacctgtatcgctgcgagaacgtgtatcgttttcgccggataagctcgatcaggcgcttgacagcctgcttgcgcagccgatggtgcagggcggtgtggtgctgtcgacgtgtaaccgcacagaactttatctcagcgttgaagaacgggatgacctgcaagaggcgctcattcgctggttgtgtgattaccataatctcaacgaagacgatctgcgtaatagcctctactggcatcaggataacgatgcggtcagtcatttaatgcgcgttgccagtgggcttgattctctcgtccttggcgagccgcagatcctcggtcaggttaaaaaagcgtttgccgattcgcaaaaaggtcatatgaaggccagcgaactggaacgcatgttccagaaatctttctctgtcgcgaaacgcgttcgcactgaaacagatatcggtgccagtgctgtgtctgtcgcttttgcggcttgtacgctggcgcggcagatctttgaatcgctctctacggtgacggtactgctggttggcgcgggcgaaaccatcgagctggtggcgcgtcatctgcgcgaacacaaagtacagaagatgattatcgccaatcgcactcgcgaacgtgcccaaattctggcagatgaggttggcgcggaagtgattgccctgagcgatatcgacgaacgtctgcgcgaagccgatatcatcatcagttccaccgccagcccgttgccgattatcggtaaaggcatggtggagcgcgcattaaaaagccgtcgcaatcaaccaatgctgctggtggatattgccgttccgcgcgatgttgagccggaagttggtaaactggcgaatgcttatctttatagcgttgacgatctgcaaagcattatttcgcacaacctggcgcaacggaaagctgctgctgtggaggcggaaactatcgtcgcccaggaggccagtgaatttatggcatggcttcgagcacaaagcgccagcgaaactattcgcgattatcgtagccaggcagagcaggttcgtgatgagttaactgctaaagcgttagcggcccttgaacagggcggtgatgcgcaaaccattatgcaggatctggcatggaaactgactaaccgcctgatccatgcaccaacaaaatcacttcaacaggctgcccgtgacggggataacgaacgcctgaatattctgcgcgacagcctcgggctggagtagcagtacatcattttctttttttacagggtgcatttacgcctatgaagccttctatcgttgccaaactggaagccctgcatgaacgccatgaagaagttcaggcgctgctgggtgatgcgcaaaccatcgctgaccaggaacgttttcgcgcattatctcgtgaatatgcgcagttaagtgatgtttcgcgctgttttaccgactggcaacaggttcaggaagatatcgaaaccgcacagatgatgctcgacgatcctgaaatgcgtgagatggcgcaggatgaactgcgcgaagctaaagaaaaaagcgagcaactggaacagcaattacaggttctattactaccaaaagatcctgatgacgaacgtaacgccttcctcgaagtccgtgccggaaccggcggcgacgaagcggcgctgttcgctggcgatctgttccgtatgtacagccgttacgccgaagcccgccgctggcgtgtagaaatcatgagcgccagcgagggtgaacatggtggttataaagagatcatcgccaaaattagcggtgacggtgtatatggtcgtttgaaattcgaatctggcggtcatcgcgtgcagcgtgttcctgctacggaatcgcagggtcgtattcatacttctgcttgtaccgttgcggtaatgccagaactgcctgatgcagaactgccggacatcaacccagcagatttgcgcattgatactttccnctcgtcaggggcgggtggtcagcacgttaacaccaccgattcggcaattcgtattactcacttgccgaccgggattgttgttgaatgtcaggacgaacgttcacaacataaaaacaaagctaaagcactttctgtactcggtgctcgcatccacgctgctgaaatggcaaaacggcaacaggccgaagcgtctacccgtcgtaacctgctggggagtggcgatcgcagcgaccgtaaccgtacttacaacttcccgcaggggcgcgttaccgatcaccgcatcaacctgacgctctaccgcctggatgaagtgatggaaggtaagctggatatgctgattgaaccgattatccaggaacatcaggccgaccaactggcggcgttgtccgagcaggaataatggaatatcaacactggttacgtgaagcaataagccaacttcaggcgagcgaaagcccgcggcgtgatgctgaaatcctgctggagcatgttaccggcagagggcgtacttttattctcgcctttggtgaaacgcagctgactgacgaacaatgtcagcaacttgatgcgctactgacgcgtcgtcgcgatggtgaacccattgctcatttaaccggggtgcgagaattctggtcgttgccgttatttgtttcgccagcgaccttaattccgcgcccggatacggagtgtctggtggagcaggcactggcgcggttgcctgaacaaccttgccgtattctcgatctcgggacgggtaccggggcgattgcgctggcgctggccagcgagcgtccggactgcgaaattaccgctgtagatcgtatgccagatgctgtctctctggcgcaacgtaatgcccagcatctggctatcaaaaatatccacattctgcaaagcgactggtttagcgcgctagccgggcagcagtttgcgatgattgtcagcaatccgccgtatattgacgagcaggacccacatcttcaacaaggcgatgtccgctttgagccgctcactgcgctggttgcggcagacagtggaatggcagacatcgtgcatatcatcgaacagtcgcgtaacgcgctggtatccggcggctttctgcttctggagcatggctggcagcagggtgaagcggtgcgacaggcatttatcttcgcggggtatcatgacgtcgaaacctgccgtgactatggggataacgagcgcgtaacgctcggccgctattatcaatgacaagtttttctacgttgcttagcgttcatctcattagtatcgcgctttctgttgggctattgaccttacgtttctggctacgttatcagaagcatccacaggcatttgctcgctggacgcgcattgtgccgccggttgtcgatacgctgttattgttaagcggcattgcgttgatggctaaagcgcacatccagccattttccgggcaggcacagtggctgactgaaaagctgtttggagttatcatttatatcgttttgggttttattgcactcgattatcgtcgtatgcacagtcagcaggcgcgcattattgccttcccgctggcgttggtggtgctgtacatcatcattaaactcgccaccacaaaagtaccgttactggggtaagtcatgagatcgttagctgatttcgaatttaataaagcgccattgtgcgaaggcatgatcctggcttgcgaagcaatccgccgcgattttccctcgcaagatgtttacgacgaactggagcgtctcgttagtctggcgaaggaagaaattagccagcttctgccattagaagagcagctagaaaaattaatcgcgctgttttacggcgaatgggggtttaaagcctcacgcggcgtttatcgtctttccgatgcattatggctggaccaggtgttaaagaatcgacagggcagtgcggtatcattaggtgcggttttattatgggtcgcgaatcgtctcgatttgccgctgctgccggtgattttccctacgcagctgatattgcgcattgaatgtccggatggcgaaatttggctgattaatccttttaacggtgaatcgttaagcgaacatatgctggatgtgtggttaaagggaaatatcagcccgtcggcggaactgttttatgaagaccttgatgaagctgataacattgaggtaatccgcaaattgctggatacactcaaagcttcgttgatagaagaaaatcagatggagctggcgttacgcaccagcgaagctttattacaattcaacccggaagatccctatgaaattcgcgatcgcgggttgatttatgcgcaactggattgcgaacacgttgcgttgaacgatttaagttatttcgttgaacagtgtccggaagacccgatcagcgaaatgatccgtgcgcaaataaataacatcgcgcataaacatattgtgctgcattaattaatcgacattttactcaagattaaggcgatcctatgaaacaaaaagtggttagcattggtgacatcaacgtagcaaatgacctgccgttcgtactgtttggcggtatgaacgtgttggaatctcgcgatctggcgatgcgcatttgcgagcactacgtaaccgtgacccagaaactgggtatcccttacgtgttcaaagcctcttttgacaaagccaaccgctcctccatccactcttatcgtggaccgggcctggaagaagggatgaaaatcttccaggagttgaagcagacttttggcgtgaaaattatcaccgacgttcacgaaccaagccaggcacagcccgttgctgatgttgtagatgtgattcagttgccggcgtttcttgctcgccagactgacctggttgaagccatggcgaaaaccggtgcggtaattaacgtcaagaaaccgcagtttgtcagcccgggacagatgggtaatatcgttgataaattcaaagaaggcggcaacgaaaaagtgattctttgcgatcgcggtgctaacttcggctatgacaacctggttgttgatatgctgggcttcagcatcatgaagaaagtgtctggtaattcgccggtgattttcgacgttacccacgcactgcaatgtcgcgatccatttggcgcagcttccggcggtcgccgtgctcaggtggctgagctggcaagagccggtatggcggtaggtctggcggggctgtttattgaagcgcatccggatccggaacatgcgaaatgtgatggtccatccgcgctgccgctggctaaactggaaccgttcctcaagcaaatgaaagcgattgatgatctggtgaaaggtttcgaagaactggataccagcaagtaatcttttttgcctgaaaaataaagtcttagcgttctgcgttaagacttttttcatgggtgccggatacaaaaaaggccgcaggctgttacccctgcggccggtttcgggcgcatattgccatcacggcagcctgacgcccgttttcaccttacttccggctacgccaccagccaacaatcgctgcggtaataattcccgcaaggatcggtgctgccaggtcgtgccagaaaatcacggcaaactgcgcgagcgtcatatagccgcctttttgttgtaatgacaacattttgcggctattcttgaattgttgatggttcaagattagcccccgttctgttgtcaggtttgacctctcaacgtgcgggggttttctctttccagcaaccaatgccgccagggataaagcccccacaacattgcgcctcaccggataacgccggcttggtgtcgatactacgtctcaatttatattcacttcatccctgaaatgtgcgcaatgctgtacgcgttccggcttttcatcagctgttgcagtggtttcgtgcaggttgtggtacaggctcgcaaatctgattaacaatctgttcaggtagtatgaagaaatactataagcagataatttttattatctcctccgatttccgccatcggaggagatataaatgtcaggcaaatattgtcattaaataagctgcaaacagtgccagatgcgccgcgccattgagcacgttagttcgtccggtggagaaggagatatggcacagtactaaagaggccaccatcaccaccatttctggcgcaccaagtgcaaactgcaattcgttacccgtcataaaggcaattagcgtgacgacaggtacggtaagcgaaatggttgccaacactgaaccaaagaacagattcatcgcgcgctggacctggttattcaacactgcttttaacgcacctaaaccttccggcgacagaatcaacagagccaccaggaagccagtaaaggcgacaggcgcattcatgctgtcgagcaatgtctccagcgggctggcgttcattttggtgactgcaataacggcaatcagatggacaatcaaccagatggcatgccacaggctgctatgggcagacggtttaccgtggtgcgggtcgtcatcatcactgtcatcttcgtgctcgtagacaaacaaactttgatgtgttttggtctggatcagcaaaaatacgccatacattgccgcagaaattaatgctaccagtaacgcctgacctgttgaaaaattcgccgcaggcagagccattggaaataccagtacgattatcgccagggggaacagcgcaattaaatactgcttgataccaaacagattcatatattgggtggcaaacttacgtccgcccaacaataatgaaaagccaaccagcccacctgtaacaatcataatgattgaatagagcgtatcacgcattagcgttggcgcggcgtcgccggttgccattaaagctgaaatcaaactgacttcaagaataaccactgaaaggctaagaataagcgaaccgtaaggttctcccaggcgatgggctaatacgtccgcatgacggacaacactaaaggcgctacttaaaataccaataagcgcaagaagattgatggcaatgaccactggtagtgtctggctgcttccccacaggaacagcactaccagcgccagaaccgggaaaataagcgaagtctccttgtggcgggtttttaccgcctcttgagcatttgacattatggttatccctttgcagatgaatttatcgaaaatgtaaaaaataggtaggaaaaataacagaaagtgtctggatatcggtaacattttacgaatttttaccccgctgtcgattttttactcatttgggcataaaaataagtaatacgtttagacaatgtttgttttagcacttcttaagaagagtctgacatgaaaattcttatgttttggcaagagtagatattgttgaccacacttaatgttcaactttgtaaaaggagtcaacgatgccgtataaaacgaaaagcgatctgccggaaagcgtaaagcacgtgcttccgtctcatgcccaggatatctataaagaagcgttcaacagcgcatgggatcaatataaagataaagaagatcggcgtgatgacgccagtcgcgaagaaacagcgcataaagtggcctgggctgctgtgaagcatgaatatgccaaaggggatgatgataaatggcataaaaaatcgtaaaaccggtagcttagttaaagctattcgttgcaagtggtccgtggattgcatattgtcccgttagtggtttcaaaatgagcagtaaaaatgtccggaagacaccaaaaagttgtcgcagggaagtatgcagtggcggaggtgtaaggtgataacgcgtgatttcttgatgaatgccgattgtaaaacggcatttggtgccattgaagaatcactcttatggtcagcagaacaacgggcggcttcgctggcggcgacgctggcttgtcgacctgatgagggaccggtgtggatcttcggttatggatcgttgatgtggaatccggcactggagtttaccgagtcgtgcaccggtacactggttggatggcatcgcgcgttttgcctgcgcctgaccgccgggcgcgggactgcgcaccagccgggacgaatgcttgcactgaaagagggcggacgcaccacaggcgtcgcctatcgactgccagaagagacgctggagcaggaactaaccctgctgtggaagcgcgagatgattaccggctgttatctgccaacctggtgtcagcttgatcttgatgatggacgcacagtaaacgccattgtgtttattatggacccgcgacatccagaatatgaatctgacactcgcgctcaggtcatagcgccgttgattgcggcggcgagcggtccgctgggaaccaatgcacaatacctgttttcactggaacaggagcttatcaaactgggaatgcaggacgatgggctgaatgaattgctggtatcggtaaaaaaactgctggcggagaattatccggatggtgtgttacggccgggattcgcctgagtaaactttcctcatagtggggcgtcagacgccccctcaaacattaaaatgtgagcactttatcggctgacagcgtccattgcgccagttcaacaagagtaccgatttccaccccatcaatcagaggaagtgtactaatcccgcgcccgtcggtacaggttttgcacaatttcaccggtacattctgagcggtaaggatctccagcatttgctgaatgttgtagccttcccctggtttttgcccgcgcaacccggctgttaccgcatcagacatcaggaacagacgcagatccagattgttctcctgctctcgtaacgcaatggccagccgcaagctgttaaacaaggattcgctcccgtaaggtgcgccattggcaacgatcacgattttttgcattatttactcctgtattcagggaattagacactcatcttctatcttactgcttctgcagcgtctgaccaatcggtcacatttttaaggattttcctgaaagcgcgagaaaatacgacaaaaggtgccagtaatcgttattctttaaggctatggtttttcatttttaccggaagttaccgacgttttgagccgtttcgttcctcgcattattccgttttatttactcttgctggcggcaggcggtacagctaacgcacaatctaccttcgagcaaaaagcggcaaatccctttgataataacaatgatggtctgccggatttaggcatggcacctgaaaatcatgatggggaaaaacactttgctgaaattgtgaaagatttcggcgaaaccagtatgaatgataacgggctggatactggcgagcaggcaaaagctttcgcattgggaaaggtccgcgacgcgcttagtcaacaggttaatcagcacgtagagtcctggctatcaccgtggggaaatgccagtgttgacgtcaaagtggataacgaaggacatttcaccggcagtcgtggaagctggtttgtgccgttacaagataatgatcgttatctcacctggagccagcttagtcttactcagcaggatgatgggctggtgagcaatgtgggcgttgggcaacgctgggcgcgcggcagctggctggtgggttataacactttttatgacaacttgctggacgaaaatcttcagcgagcgggctttggcgctgaagcgtggggcgaatatttgcgactatcggcaaacttttatcagccgtttgctgcatggcatgaacagacagccacgcaggaacaacggatggcgcgcgggtacgacctgacagcccggatgcgcatgccgttctatcaacacctcaataccagtgtcagcgtagaacagtattttggtgatcgtgtcgatttgtttaactctggtacgggttatcacaatcccgtcgcgttgagtctgggattaaattacacccctgtgcccttagtcactgtgacggcccagcataaacagggtgaaagtggcgagaatcaaaataacctcgggctgaatcttaactaccgctttggtgtaccgctcaaaaaacaactttctgcgggcgaggttgccgaaagtcagtcgttacgtggtagtcgctatgacaatccgcagcgaaataatcttccgactcttgagtaccgacagcgaaaaacgttgacggtgtttctggcgacaccgccgtgggatctaaaacctggcgaaacagtgccgctgaaattacaaatccgcagtcgttacggtattcggcaactgatttggcagggcgatacgcagatattaagtttgacgccgggcgcacaagccaacagtgaggagggctggacgctgatcatgcctgactggcaaaacggggaaggcgcaagcaatcactggcgattgtcagtggtggtggaagataaccaggggcagcgtgtctcctccaatgagatcacgctaacgcttgtcgaaccgttcgacgcattgtcaaacgacgaactgcgctgggaaccgtaatcagaaaatgcgctcctgatgcacccataccgcagcttccacgcgagactttagcttcattttcttcagcatgtgcttgacgtgaacttttactgtgctttcggtgatgtccaggcggcgggcaatcatcttgttcggcaaaccctgggcaattagcttgagaatatcgcgctcgcgtggggttaactggttaacatcgcgctcagtagtggcacggttagcgcgcaagctggcggccagaacaggcgttaatgcttcgcttaataccatttcgccagcagctgcctgatgtaacgctttcagcagatcttccggttccatatcttttaacagatagccatccgcgccgcgtttcagtgcggtgaccacatcttcttcatggttagagacgctgaataccacaatgcgcccggagagggacttttcgcgcagtttatccagcgtttccagaccgttcatgccgggcatattgagatctaacaggatcagatcgggatcaagagactccgccagttcaataccctgttcgccattactcgcttcgccaaccacggtgatatctggtgccatactgataagctgttttacgccagttcgcaacatcgggtgatcgtcgatcagcaggatagtagccggttcctgattactcatgggtatctccttggacgtctgtgaaagttttttcgggaataaaggtgaccaccacttcggtgccacctgattcacgacggcggacgcggcaatcgcctcgtaaactttgcgcacggtcgcgcattattatcatgccgtagtgattgctgcggatggcattttcaggcacgccgcagccgttatcctggacggtcagtttgacctgattatcgttttgcgccaccgtcaccacgacctcactcgcttgcgaatgtttgagggcgttacttaatgcctcacgggcaatttgcaacaagtggattgcctgatgcgaaggcaccagacgaggcggcaattgataatccagcttcaccgggaagccaaatttggcgctgtactcttcgcaactcgcctccagcgccggacgtaatccaggctcggtgagctgcaaacggaatgtggtgagcaattcacgcaactgcacccaggatgcattcagttcgttacggatctgacttaacagttcgcggctgctttctggcagcgcatcgccctgcatctgtaagcaactcacctgcatcttcatgcaagagagagattgggcaatagaatcatgcagttcgcgcgcaatggtggcacgctcttccatcacgatcaactgttgctgacgttcctgatggcgatccagcgccagcgtggcggtgagttgttcaaccagggtatccaccagttgttgttgatcatggctaagatgacgcccctgcggcagggtcgccagcaaaataccgtactgcgtatgagtgtcagccagccgccacttcagggttgtgccgcgatcgccaacgggtaatacgccgcgcgggcagagctggcagcctttatcatcacaagtcatatctggctggcaggtaaactcctgatgattctcttcatcatcagtgtcatacacccgcagttcgatatcacgtagcagggttaaattctgtaatccgttgagtacaggtgacaggcgttcacacagcggggcgcgggaatgcaaacggcggttagcctgccataaaaaagagaggatctgatttttatgctccagcccggcggttttctcctgaacccgctgctcaagtacggcataactttcggccagttctgcagacatattgttcaacgcagttccaagcatcgccatttcgttgcgcccgctgatgtttgcgcgttgggtaaaatcgcgatggctgacggcactcgccattgccagcagttgccgccacggttgtagcaatctcgcccgcaaccagataatagtgaataccagtaaaagtgccataaataccgccattacccgatggaccagcaccactgtctcaatgcgcatttccgtggtgcgatcaaaaccagataccagctgatcaagcccggcaacaaactggctgacatccgctgacaccgtttcgcggttttgtgcacgtatcagtgcagggatcagttcattacgccagtaatcttgtaaaccctgtaattgcgccagttgcccgtctcgttctgctgctcgagtcaactcggcgctaaatgctgtttgttccatctctttaattaagggcttgtctttctcgcttaatggcactgctgccaacagacggtaactttgcatgcgcagcgatcccgctttgttgatcgcatgggcgctgccctgaacgccttgcaccagccagccagaaaccgccatccctgccagtccaatagcagtagaaagcaacacaataagcgcaacctgattaaccagggtgagcggagagagacaacgtttaagcatgtaaacctcttccttcaggctttaaatgagcaataaccttaatgaatgtgacgatacattctggaatggcagtattctcggctattggctgaagtatacccatacccggaaagagttactccttatttgccgtgtggttagtcgctttacatcggtaagggtagggattttacagtaccgtgaaaaatctcataatttttatgaaatcactgtactcactatggataatgataaatatcaatgatagataaagttatcttatcgtttgatttacatcaaattgcctttagctacagacactaaggtggcagacatcgaaacgagtatcagaggtgtctatgagtcactcatccgcccccgaaagggctactggagctgtcattacagattggcgaccggaagatcctgcgttctggcaacaacgcggtcaacgtattgccagccgcaacctgtggatttccgttccctgtctgctgctggcgttttgcgtatggatgttgttcagcgctgttgcggtgaacttaccgaaagtcggttttaattttacgaccgatcagctatttatgttgactgcgctgccttcggtttctggcgcgttattacgtgttccatactcctttatggttcctatcttcggtggtcgtcgctggacggcgttcagcaccggtattctgattattccttgcgtctggctgggttttgccgtgcaggatacctccacgccttatagcgtcttcatcatcatttctctgctgtgcggctttgctggcgcgaacttcgcatccagtatggcaaacatcagcttcttctttccgaaacagaagcagggtggcgcgctgggtctgaatgggggtctgggcaacatgggcgtcagcgtcatgcagttggttgctccgctggtggtatcactgtcgattttcgcagtatttggtagccagggcgtcaaacagccggatgggactgagctgtatctggcgaatgcgtcctggatatgggtgccgttacttgccatcttcaccattgcggcgtggtttggcatgaacgatcttgccacctcgaaagcctccatcaaggagcagttgccggtactcaaacggggtcatctgtggattatgagcctgctgtatctggcaaccttcggctccttcatcggcttctccgcgggctttgcgatgctgtcaaaaacgcagttcccggatgttcagattctgcaatacgctttcttcgggccgtttattggtgcgctggcgcgttctgcaggtggtgcattatctgaccgtctgggcggaactcgtgtcacgctggtgaactttatcctgatggcgattttcagcggcctgctgttcctgaccttaccgactgacggacagggcggaagcttcatggcgttcttcgcagtcttcctggcgctgttcctgaccgctgggctgggtagtggttccactttccagatgatttccgtgatcttccgtaaactgacaatggatcgcgtgaaagcagaagggggttctgacgaacgtgcgatgcgtgaagcggcaaccgacacggcagcggcgctgggtttcatctctgcgattggcgcgattggtggcttctttatcccgaaagcgtttggtagctcgctggcattaacgggttcgccagtcggcgcaatgaaagtatttttgattttctatatcgcctgcgtggtgattacctgggcggtatatggtcggcattctaaaaaataaatcgtaatatttgattatcctttgcgcggcatgatgtcgcgctttttttatgcgtcatttagttacaacatactaatgttgtatggcttatttcgctggatttcattaagagtcattaatatgttacccatggggaatactccttaatacccatctgcataaaaatcttaatggtttaaataactacaggtgtaaaacgtcttaatttacagtctgttatgctataaatgttaattatcctaaaggggtattccaggaatttactttatttttcatccccatcactcttgatcgttatcaattcccacgctgtttcagagcgttaccttgcccttaaacattagcaatgtcgatttatcagagggccgacaggctcccacaggagaaaaccgatgagtaaattcctggaccggtttcgctacttcaaacagaagggtgaaacctttgccgatgggcatggccagcttctcaataccaaccgtgactgggaggatggatatcgccagcgttggcagcatgacaaaatcgtccgctctacccacggggtaaactgcaccggctcctgcagctggaaaatctacgtcaaaaacggtctggtcacctgggaaacccagcagactgactatccgcgtactcgcccggacctgccaaaccatgaacctcgcggctgcccgcgcggtgccagctactcctggtatctatacagcgctaaccgcctgaaatacccgatgatgcgcaaacgcctgatgaaaatgtggcgtgaagcgaaggcgctgcatagcgatccggttgaggcatgggcttctatcattgaagacgccgataaagcgaaaagctttaagcaggcgcgtggacgcggtggttttgttcgttcttcctggcaggaagtgaacgaactgatcgccgcatctaacgtttacaccatcaaaaattacggcccggaccgtgtcgctggcttctcgccaattccggcaatgtcgatggtttcttacgcatcgggtgcgcgctatctctcgctgattggcggtacttgcttaagcttctacgactggtactgcgacctgcctcctgcgtctccgcaaacctggggtgagcaaactgacgtaccggaatctgctgactggtacaactccagctacatcatcgcctggggttcaaacgtgccgcagacgcgtaccccggatgctcacttctttactgaagtgcgttacaaaggaaccaaaactgttgccgtcacaccagactacgctgaaatcgccaaactgtgcgatctgtggctggcaccgaaacagggcaccgatgcggcaatggcgctggcaatgggtcacgtaatgctgcgtgaattccacctcgacaacccaagccagtatttcaccgactatgtgcgccgctacaccgacatgccgatgctggtgatgctggaagagcgcgacggttactacgctgcgggtcgtatgctgcgcgctgctgatctggtggatgcactgggccaggaaaacaatccggaatggaaaactgtcgcctttaataccaatggtgaaatggttgcgccgaacggttctattggcttccgctggggcgagaagggcaaatggaatcttgagcagcgcgacggcaaaactggcgaagaaaccgagctgcaactgagcctgctgggtagccaggatgagatcgctgaggtgggcttcccgtactttggtggcgatggcacggaacacttcaacaaagtggaactggaaaacgtgctgctgcataagctgccggtgaaacgcctgcaactggctgatggcagcaccgccctggtgaccaccgtttatgatctgacgctggcaaactacggtctggaacgtggcctgaacgacgttaactgtgcaaccagctatgacgatgtgaaagcttacacccctgcctgggcagagcagattaccggcgtttctcgcagccagattattcgcatcgcccgtgaatttgccgataacgctgataaaacgcacggtcgttcgatgattatcgtcggcgctgggctgaaccactggtatcacctggacatgaactatcgtggtctgatcaacatgctgattttctgcggctgtgtcggtcagagcggcggtggctgggcgcactatgtaggtcaggaaaaactgcgtccgcaaaccggctggcagccgctggcgtttgccctcgactggcagcgtccggcgcgtcacatgaacagtacctcttatttctataaccactccagccagtggcgttatgaaaccgtgactgcggaagaactgctgtcgccgatggcggataaatctcgctataccggacacttgatcgactttaacgtccgtgcagaacgcatgggctggctgccgtctgcgccgcagttaggcactaacccgctgactatcgctcgcgaagcagaaaaagccgggatgaatccggtggactatacggtgaaatccctgaaagagggttctatccgtttcgctgcggaacagccggaaaacggtaaaaaccacccgcgtaacctgttcatctggcgttctaacctgctcggttcttccggtaaaggtcatgagtttatgctcaagtacctgctggggacggagcacggtatccagggcaaagacctgggtcagcagggcggcgtgaagccggaagaagtggactggcaggacaacggtctggaaggcaagctggatctggtggtgacgctggacttccgtctgtcgagcacctgtctctattccgacatcattttgccgacggcgacctggtacgaaaaagacgacatgaatacttcggatatgcatccgtttattcacccgctgtctgcggcggtcgatccggcctgggaagcgaaaagcgactgggaaatctacaaagccatcgcgaagaaattctccgaagtgtgcgttggtcatctgggtaaagaaactgacatcgtcacgctgcctatccagcacgactctgccgctgaactggcgcaaccgctggatgtgaaagactggaaaaaaggcgaatgcgacctgatcccaggtaaaactgcaccgcacattatggtcgtagagcgcgattatccagcaacttacgaacgctttacctctatcggcccgctgatggagaaaatcggtaacggcggtaaagggattgcctggaacacccagagcgagatggatctcctgcgtaagctcaactacaccaaagcggaaggtccggcaaaaggccagccgatgctcaataccgcaattgatgcggcagagatgatcctgacgctggcaccggaaaccaatggtcaggtagctgtaaaagcctgggctgccctgagcgagtttaccggccgtgaccatacgcatctggcgctgaataaagaagacgagaagattcgcttccgcgatattcaggcacagccgcgcaaaatcatctccagcccgacatggtctggccttgaagatgaacacgtttcttacaacgccggttacaccaacgttcacgagctgatcccgtggcgtacgctctctggccgtcagcagctgtatcaggatcaccaatggatgcgtgatttcggtgaaagcctgctggtttatcgtccgccgatcgacacccgttcggtgaaagaagtgatgggccagaaatccaatggcaacccggaaaaagcgctcaacttcctgacgccacaccagaagtggggtatccactccacctacagcgacaacctgctgatgctgactttaggtcgcggtggtccggtggtctggctgagtgaagccgatgccaaagagctgggtatcgccgataacgactggattgaagtcttcaacagcaacggtgcactgactgcccgtgcggttgtcagccagcgtgttccggcagggatgaccatgatgtaccacgcgcaggaacgtatcgttaacctgcctggttcggaaattacccaacagcgtggtggtatccataactcggtcacccgtatcacgccgaaaccgacgcatatgatcggcggctatgcccatctggcatatggctttaactactacggcaccgtaggttctaaccgcgatgagtttgttgtagtgcgtaagatgaagaacattgactggttagatggcgaaggcaatgaccaggtacaggagagcgtaaaatgaaaattcgttcacaagtcggcatggtgctgaatctcgataagtgcatcggctgccacacctgttcagtgacctgtaaaaacgtctggaccagccgtgaaggcgtggaatacgcgtggttcaacaacgtggaaaccaagccgggccagggcttcccgactgactgggaaaaccaggaaaaatacaaaggcggctggatccgtaaaatcaacggcaaactgcagccgcgcatgggtaaccgtgccatgctgctgggtaaaatcttcgctaacccgcatctgccggggatcgacgattattacgagccgttcgattttgattatcagaacctgcataccgcgccggaaggcagcaaatcacagccgattgcccgtccgcgttcactgattaccggcgaacggatggcgaaaatcgaaaaagggccgaactgggaagatgacctgggcggtgagtttgacaagctggcgaaagacaagaacttcgacaacatccagaaggcgatgtatagccagttcgaaaacaccttcatgatgtatttgccgcgcctgtgcgaacactgtctgaacccggcatgtgtggcgacctgcccgagcggtgcgatttacaagcgtgaagaagatggcatcgtcctgatcgaccaggataaatgccgtggctggcgtatgtgcatcaccggatgcccgtacaaaaaaatctacttcaactggaagagcggtaagtctgagaagtgcatcttctgctatccgcgtattgaagccggccagccgacaatatgttcagaaacctgtgtcggtcgtatccgttatcttggcgtgctgctgtacgatgccgacgcgattgaacgtgcggcaagtaccgagaacgagaaagatctctaccagcgtcagctggatgtgttcctcgatccgaacgatccgaaagtcatcgagcaggcgattaaagacggtattccgctgagcgttattgaggctgcgcagcagtcgccagtttataaaatggcgatggaatggaaactggcgctgccgctgcatccggaatatcgcacactgccgatggtctggtacgtgccgcctctgtcgccgattcagtctgcggcagacgcgggtgaactgggcagcaacggcattctgccagacgtcgaaagcctgcgtattccggtacagtatctggcgaatctgctgaccgccggtgataccaaaccggtactgcgcgcgctgaaacgtatgctggcgatgcgtcattacaaacgtgctgaaaccgttgacggtaaagtcgatacccgtgcgctggaagaggtcggtctgaccgaagcccaggcacaggagatgtatcgttatctggctattgccaactacgaagatcgctttgtggtgccgagcagtcatcgtgaactggcgcgggaagccttcccggagaaaaatggctgcggctttacctttggtgatggctgccacggttcagataccaaattcaatctgttcaacagccgccgtatcgatgccatcgatgtaaccagcaaaacggagccgcacccatgatcgaactcgtgattgtatcgcgtctccttgaatatccggatgctgccttatggcagcatcaacaagagatgtttgaggcgattgccgcgtcgaaaaatctgccaaaagaggatgcccatgcgctgggcattttcctgcgcgatttaacgacgatggatccgctcgatgcccaggcgcagtacagcgaactgttcgaccgtggccgcgccacgtcactgttgctatttgaacatgttcacggtgaatcccgtgaccgcggccaggcgatggtggatctgctggcgcagtacgagcagcacggcttgcagttaaacagccgcgaattgcccgaccatctgccgctgtatctggagtacctggcgcagctgccgcaaagcgaagccgtggagggtttgaaagatattgcgccgattctggcattgctgagcgcgcgtctgcaacagcgtgaaagccgttatgccgtgctgtttgatctgctgctgaaactggcgaataccgcaatcgacagcgacaaagtggcggaaaaaattgccgatgaagcgcgcgacgatacgccgcaggcgctggatgcagtctgggaagaagagcaggttaaattctttgctgaaaaaggctgcggtgattcagcaatcactgctcatcagcgtcgctttgccggtgccgtcgcgccgcaatatctgaatatcaccaccggaggacagcactaatgcaattcctgaatatgttcttctttgatatctacccgtacatagccggggcggtcttcctgattggtagctggctgcgttatgactacgggcagtacacatggcgtgcggcgtccagccagatgctggatcgcaaagggatgaatctggcgtcgaacctgttccatatcggtattctggggatttttgtcggtcacttcttcggtatgctgacgccgcactggatgtatgaagcctggctgccgattgaagtaaaacagaaaatggcgatgtttgctggtggtgccagcggcgtactgtgtctgattggcggcgtgctgttgttgaaacgtcgtctgttcagcccacgcgtgcgtgcaacgactaccggagcggatatcctgatcctgtcgctgctcgttatccagtgcgcgctgggcctgctgaccattccgttctccgcccagcatatggacggtagcgagatgatgaaactggttggctgggcgcagtcggtagtgaccttccacggtggcgcttctcaacatcttgatggcgtggcgtttatcttccgtctgcacctggtgttggggatgacgttattcctgctgttcccgttctcgcgtctggtacacatctggagcgtcccggtggagtatctgacgcgtaagtatcagctggtgcgcgcccgtcactaattatctaaaccaaacatcggtggttacacactgccgatttttcggattgtagggaaacgtacttcatctatatgattggtccacctatggagcagtgaaggagcactgaccgtggctcgacctaatcaaccgacgatctccgcggcgttaaaaataatcgccacggggatcgccttaccccctgatcaaatcacttctcaacaactggatgttcagttaaataagccagttggctatgttgagcgacgttccggtatttgctggcgctattttgcccgcaacgacgccagccaggccgaactggcggcagaggctttacataatgcgttagtagcggcagccttaaatcctactgatattgatctgctaatttgtgcatcggccattgccgtacaggcattaccctgtagcgcaattcatattcttaaagccgcagccatgcccgcaggcgttgccgggtttgatatcaacagtagctgtgtgagctttatttccgctcttgaagtcggtgccggattattaaactgtggagcatatcggcgcattgccatcgtttcggcagatattgcttcacgaggtatcgactgggatcatgaagagtcttcattaatttttggtgatggcgcggcgtgcgcgattgttgagcggggcgatgggcgcagcgggattatcgctagcctgatcgaaatgtatcccgaaggcagcgaactgtgtgaaatacgcgccggcggtacgcggcgtaatcctcgttctggtgtgagtgatagcgactttctttttcatatgcaggggaaaccgctgtttcgttttgcttcttcgcttattgaagattatttttctcggttgctgcaaaaaagcagcctgcaactggatgatatcggcacggtcgttccacatcaggccagtcatctttcccttgaacatatgcgtaaacggctgcgagtgccggaatctgcgctcatcgatgtgtatcgtttttacggcaatcaggtcgcggcctctatccccacggcgctgcatgaagcagtgattagcggtcgtttcacagcggataaacctgtaatgttgattggcacggcagcgggactaacgctggctggcatggtgcttttaccgtgaagatcctcgtaacaggggcgaccagcggccttgggcgaaatgccgtgcaatatttgttgcaatcgggtgagtcggttgtggcaacagggcgaaattgtgaggttggcagaagcctgacaaacgcaggcgcacagtttgtggctctcgatttaaccgaggcatccgaggatgactgcgcccgcctgatggacggctgcgatgccgtctggcactgtgcggcaaagtcctcgccctggggcgacaaaacggcgttctggcttgccaatgtcaaagtgacccacactctggcacaggcggcaggcaggctgaatattccccggtttatccatatctccacgcctgcggtttactttgattttcaacatcacaatgacctgccagaaacgtatcttgcgcgagcattctccagccattatgccagcagtaaatatgccgctgagcaggttattgctggcgctgtttctcgatattctgccacgagatttattcttttgcgtccccgtggtttgtttggcccccatgaccaggtaattgttcctcgtctgatgcagcaattgcaacagggcggtggttgcttacgtttgccgcgcgggggcgacgcgttattggatctcacgttcgtgcaaaacgtggtgtatgccatgcggctggcaacgaacgttgaaggcttacgctcgggcagtatttacaacatcagcaatcaccagccgcagcagctatcggtgatgcttgacgccttgctgcaccagcaactgggcttgagttaccgcattgctgctgttccctggtcgctgctttctctggtcgcgcgtggcctggaactgtacgggaagtgcgttaatcaggaacctgttatcacacgatacagcgccggaacactctgtttcgatatgacgctgagtgcgcaaaaggccattacagagctgggatatcgaccgcgcttttcgatggaacaaggtattgcaatcacgggacaatggctgagggaacatggcaaaaataaccgcatttgaaacgggctggtgtacccatattagctgtattgcgctgaaaggggcagggctgaaagtgtgcaaattccccgcccgcgcctggctgctggaggtgggcgacaaacggtggctgtgggacacaggctattcatcgtggttcgaacactacacgcaatctggtgtgtttcgtctttatcgtcaggtcacgccggtttatttcgatccgcaacaggcgctggtgcggcaactttctgccaccggcctcgcagcgaaagatgttgatgcgattattctgtcgcattttcacgctgatcatattgctggtctgcgtgattttcctgatgtttcctgcatctgttctggtgaaggctggcggcaagtaagaactctgcgtggtgtcactgcgctgcgccaggcctttgtgccagggctaatcccggagaattttgactcctcactgcgctttattgaaagtttcgcatcggtgaatttgcccgcgcaactggcaccgtttgagtgcggctatttgctgccagaaagcaatggcgaaattattctcgtgccgcttcccggacatgctgccggacatattggcgcgtttgtgttaaccgacaacggctggactttactggctggcgatgcggcatgggcgccagctaactaccgggagctgcgagggccttcaccactggcgcatctggttatgtccgacagccacgcctactaccacacgcttgggcaactccatcagctttggcaaaacggtgtagtggagattcgtttgtgccatgagggggatttatgatcccgttggctttactctggcgctactttcgtacccgcaagctgcatttcaccgatcgcgaggcactggaaaactggcaggcaaaaaggctgcatcagttccggcaaaatgtcttatctcatagcccgtggtttcagcgttatctgacgttgccctttaatcagtggccaatgatggataaagcgttaatgatgacgcacttcgatgagatgaataccgcaggtttaaagcgcgacgaacttctcgattgtgcaatgcgcagtgagcagagtcgtgatttcaaaccctgcgttggcaggttcagtgttgggctttcatcaggtacatcgggtcgtcgtgggctttttgttgttagcccgcacgagcaacagatgtgggccgccggtgtgctggcaaaagtgttgcccgacggtttatttgccaaagagcgggtggcgctgtttctgcgcgcggacaacaacctgtatcaaagcgtgaataatcgctggttaagtctcgatttttacgatctgctagcgccatttcaggcgcaactcaaacttctccaacagcgagcgcccacgattattgtcgcgccagctcaggtattacgcgcactggcgctggaggtgatggccggcgaattgacgctaaaggtcaaaaaagtgatttcggtggcggaagttctggagccgcaggatcgggaattactgcgcaacgtgttccacaatgtgggggaaatttatcaggcgacagaaggctttctcgcttccacctgccggtgtggaacgttacatctcaacgaagagtttgttcacattgaaccgcaatggctggatgagcaccgtttcgtgccgatcgtcacagactttacccgcaccacacagccgatagtgcgttatcgactggatgatgtgctggtggcaagcgaacaaccatgctcctgtggcagtgcaacaatggcgattgcgcgtatcgaagggcggcaggatgaccaactgcaactaccaacaagatccggcgatattcagaccgtttttgccgatgcctgtagtcgtgtgctggcaatgacactgccgctaacagtcgattatcgcctgctacaaaccgggtcagcacaattgacgttaatcgccgattgcgagctgtggatgctggagcattgccgggaggcgttgaatgccttgtttatacgccaggatatcgctgtcgggcaattaatttggtcgctggaaccgcaaactgtgccagtctcttttacagccaagcggcggcgcattgtgcgtcagtgggggcgggaatgagcaattcactgctacgcctgaaacagatgctgctgggctggggaactgttggggttatctacaactttagcgactacctgcaaggtgagggatatcaattaacaccgtcaataattgataattggatttcgttttccccctccgctgtgtggctgtatctctcgttttttttcattgtgccgttaggttatttatccacgccactttgccacctgcgctggctggcccgttcaatgcaaatttccgcactggtggcaggcgtattttatcttctctggcccacaaccatgcattatccctcgtttgatcagatggggatatccgcgggcgcactcaacaggctgatcgccattgactcaagccagaactgtttcccctccttacacgccgcgctaacgctgttggcggtatgggcgattgccaaaaaggggaaccgttggctgacgctaatgagcgtggtctgggcgatagcaatcgccttttcgattctgcaattacgcagacatttatttatcgatttagtaggcggcgcgttgctggcgtcgatttgcggttggatatgcgcaacatgcgagaaaaggaagacacaatatgagtgatttattattccccatcatatcgatggtgctgttggtgttagccgaagcaggcgtgttgcaattcaccgggcggcaaaaagtggactggctggacgttatttttaatatcaactccggtcatatgatgctgtggttatttcgctgcctggaagtgctctgctatggcctggtgatcaatcacttcagccttggactgtttgataatgcaccggtgatcctgctgtggttgtttactatcctggcgtgggatttcggcttttactggctacatcgctggcatcacgaaatgcgcccgctgtgggcggtacatgtggtgcatcatcagggggaacactacaacctgtcattaggcgtgcggaattcgtggtactcctcgttaacctcaatcccgttttttatgctgctggcgatgcttggtgtgccgttgcagatctttttggcggtttctattattcactatagttggcaattttttaaccataacgcactaacgccgaaactgggctggctggaaaaagtgctgatcacgccttcgcatcatcgcgtccatcatctgaatcaaaagcaatatgccgataccaattacggtggcacctttttgttgtgggataaacttttcggttcgtatagtgccgggccggaatacgacgtaggctacggcgtaaaaaatagtcgcttgtcctgtaacccgatgcgcgagagtaatctgccatttttacgcttaatgggctttcgctcatttggcaaagcgattgaaggtcgctaccagagttctccatgggcggtaggggcaggggtgatcctgctgtttatgctggtgcttggctacattcaacaatatggctatggcattgagtttattaccagcgagcaagccgtattatttgttctgctggcggcaggctccgttgcgctggggggcatgagcgacgggcagcattggggtatgattttgtggtgctctgtgacgttgtcactgctctattttattgtctatatgtgttcatggagtactctgctctggaagggattagtgggtattctgctggcccattgcctgttatttgtaatcggcgtaggacgtaaatcgctaaggaaacagtatgaacctgtttaatcccgacaggttaatcacttttcctgccgatgatccacaactggtgaaacaactgcaaagcggtacgaaagtttatctggcgaaatcaggcgatcatcggtatgccgacggctgggcattcgccaaaatggcggcgttgattattgcctgtttatgctgctatgcactggcgttgtctcaaagcctgtgggggctgtatctgttgtggtatctcgcgatgatgttttgcgccatgttgttagcggtcaatgtggtgcatgacgcttcgcatgatgcgtttttgcgtggtaaaaagaccaatgcccgacttaaccggtgggttgcttttcctatggggctagatccggactgctggcgggtgcgccacgttcgctttcatcacggttttaccaatattgaattttacgatccagacacagcagaaaatggcattcttcgccagacgccgtggcaacggtggcgaccttttatgcgccagcaacatcactattggccactggtcgccgcgctcacctttccctggtatatctgggtagtggactggctcgatcgcgcagggtttacgccggtcacgcgacatctggccctgcgaggctttgctggctggggatatttcttagccgggaaactggcgcattgtgcgctgtgtctgatacttccctggcttttgtctgattttagttttatgaccatcctgctgacttatctgctcagccagctgctggcgtcattgatttttgtgacgttgattattggaacgcactgggcgaagggacatacgcagttaccaccagaagagggcaaaatgcccgtgggcagactggcgcatacctttgttaccacctttgactggacgccgcaacctgcatggcttggctactggctgggcgggattaatctgcaccttacccatcatctgtttcctcactggcatcatcgccattatccggcgctaagccgcattattgcacaaattgccagccagcaaggtctggattatcagttgttgacgttagcggatttgttgaggctacagcagcagtttttacggcgaatgggggagaagccgaaggcttgataatggaatcaagtgatggtggtgggggaaggattactcagcgctgcgcgcttcgccctacgggtcgttgcctgcggcaacgctctctcgctggcactcgagtcgaaccttggtcgaagcttctcatccttccccgcatgggcagaatatttaattgcggattcgtttgagaattcaggggcttttgaaagcgatggtggtgggggaaggattcgaaccttcgaagtcgatgacggcagatttacagtctgctccctttggccgctcgggaaccccaccaggggtaattcatattgtaggtaatgcttgagatggtggtgggggaaggattcgaaccttcgaagtcgatgacggcagatttacagtctgctccctttggccgctcgggaaccccaccacggggtaatgctttttactggcctgctcccttatcgggaagcggggcgcatcatatcaaatgacgcgccgctgtaaagtgttacgttgagaaaaatgaactggttgcgtaattttcatccgtaacggattaaagctaaccagttatttttgctggcgattaaagaataatcgtccgattaccgtaaacaaagacgcgctgcgccagtactttgtatagcgcacgacttaagacgtttttctcgacgtcacgacctgcgcgcatcatatcttcagctgtgtaggtatgatcgacatgaataacgtcctgcatgatgattgggccttcgtccagattgtcattcacatagtgagcggttgcgccaataatcttcacgccacgctcataggcctggtgataaggacgtgcgccgataaacgctggcaggaatgaatggtgaatattgatgatcttattcgggaagcgtgccacaaattccggcgttaatacccgcatatacttcgccagcaccacatagtcaggttgataagcatcaatggcatccgccatcttttgatcgtgctcgttgcggcttaacccttcatggcttaccagctcaaacggaatatcaaaccgctcaaccagagaacgtaaagtatcgtggttaccaataactgccgcgatttcgacatccaggccgccgtaattggctttcatcaacaaatcgccaaggcaatgcgcttctttagtgaccagaatcactatccggcgacgaccggcaggattcagctcgcgcacggagccttctggcaatgcgctatcgagatccgccagcagggtggaatcattaaaaatcccttccagttccgtgcgcataaaaaagcgcccggtacgatgatctacaaattcattgttctgcacgatatttaactcgtgcttgtagcaaatattggtaatacgtgcgatcagacctttttggtccggacaaatagtacgcagaactttacgttggagtgaatgcattgctggaaaaaccttgttgagagtgtttgctaaaccgtaccgtcaaccattattggccgcagcactttttaaattttttacctgaaccacaagggcagggatcgttgcggccaaactgcggacgtgtaccgtcaatatagtaccattgaccgttttctttcaaaaatcgcgaacgttcaattattgcacctgttttgccaccctcggtaaatcgagcaacaaaactgacaaatccgatattgccgccgtcctgccagcaatgttcaaatacggtcaatcccaaccattcagtatgcgcaaatccggcaatcaattcggctcgtaacgccgctgctccacaagatggatgccaggtctttattaaataatctgcgtcttgcatcacaaaagcgcagtaacgcgaacgcatgagatgttctggatcaggtgcaaccttttcaccagacacataagggtggcaacataggctatactcgacagcactaccacagggacaaagctgagacacaaataatctccctggaaacaataacggcgtattaaccgcctgagtagcactatgttaaccgagcagtagcgatgtggctacgattgcattccaggggaatcttgcgggaataatgagaaagataaaaatagggctggcgctgggatctggcgcggcaagaggttggtcgcatattggcgtaattaatgcgctaaaaaaagtgggtattgaaattgatatcgttgcaggatgttcaattggttcgctggtgggcgctgcctatgcatgcgatcgattatctgcgctggaagattgggtgacctctttcagttattgggatgttttacgcctgatggatctctcctggcagcgcggtgggttactgcgcggcgagcgtgtcttcaatcaatatcgcgaaataatgccggaaacagagatcgaaaattgttcccgtcgcttcgcggctgttgccaccaatttaagtactgggcgtgaattatggtttactgaaggcgatctccatcttgctattcgtgcatcatgcagtattccaggactaatggcacccgttgcgcataacggctactggctggttgatggcgctgtagttaacccaattcctatttccctcacgcgtgcattgggggctgatattgtgatagcggtcgacctgcagcacgatgctcatttgatgcaacaagatttgctctcctttaatgtcagtgaagaaaatagcgagaatggtgattctctgccgtggcatgcgcgtctgaaagaaaggttaggcagcataacgacacgtcgggcggtgacagcgccaacggcaacagagattatgaccacttctatccaggtgctggagaaccgccttaaaaggaaccgcatggcaggtgatccgcccgatattctgattcaacctgtttgcccgcaaatatctacgcttgatttccatcgcgcgcacgctgccattgcggccggacaactggcagtggaaaagaaaatggacgaacttttgccgttggtacgcaccaacatttgaccagaatttttatctacacttaagttaattctgacaggcgtaggtggcaatagcgtgccactattgagtaaagccagtcaggggagagaacatgacgcagccattggtcggaaaacagattctcattgttgaagatgagcaggtatttcgctcgcttctggattcgtggttttcctcattgggagcgacaacggtactggcggctgatggggtggatgcccttgagttgctgggaggtttcactccagacctgatgatatgtgatatcgcgatgccacgaatgaacgggcttaaactgctggaacatatacgcaacagaggtgaccagacaccagttctggtgatatctgccactgaaaatatggcagatattgccaaagcgttacgtctgggtgttgaagatgttttgctgaaaccggttaaagatctgaatcgcttgcgcgagatggtttttgcctgtctctatcccagcatgtttaattcccgcgttgaggaagaggaaaggctttttcgcgactgggatgcaatggttgataaccctgctgcagcggcgaaattattacaggaactacaaccgccggttcagcaggtgatttcccaatgccgggttaattatcgtcaattagttgccgcggacaaacccggcctggtgcttgatattgccgcactttcggaaaacgatctggcattttattgccttgatgtcacccgagctggacataatggcgtacttgctgccttgttattacgcgcattgtttaacggattattacaggaacagcttgcacaccaaaatcaacggttgccagagttgggcgcgttattgaagcaggtaaaccatttactccgtcaggccaatctgccggggcagtttccgctattagttggctattatcatcgcgaactgaaaaatctcattctggtttctgcgggtctgaatgcgacgttaaataccggcgaacatcaggtgcaaatcagtaatggtgttccgttaggcactttaggtaacgcttatttgaatcaattgagccagcgatgcgatgcctggcaatgccaaatatggggaaccggtggtcggctgcgcttgatgttgtctgcagaatgagcaaacgataacacgggctaaatttgcattacctgctaatgtcggctggtggtactatcgtcgctattcgtataagtaattgtcttaattatgctaactcgcctccttttcagaacttagccccttcggggtgctgatatactgggatgcgatacagaaatatgaacacgttcaaaacacgaacagtccaggagaatttaaatggctgccattaatacgaaagtcaaaaaagccgttatccccgtagcgggattaggaaccaggatgttgccggcgacgaaagccatcccgaaagagatgctgccacttgtcgataagccattaattcaatacgtcgtgaatgaatgtattgcggctggcattactgaaattgtgctggttactcactcatctaaaaactctattgaaaaccactttgataccagttttgaactggaagcaatgctggaaaaacgtgtaaaacgtcaactgcttgatgaagtgcagtctatttgtccgccgcacgtgactattatgcaagttcgtcaggggctggcgaaaggcctgggacacgcggtattgtgtgctcacccggtagtgggtgatgaaccggtagctgttattttgcctgacgttattctggatgaatatgaatccgatttatcacaggataacctggcagagatgatccgccgctttgatgaaacgggtcatagccagatcatggttgaaccggttgctgatgtgaccgcatatggcgttgtggattgcaaaggcgttgaattagcgccgggtgaaagcgtaccgatggttggcgtggttgaaaaaccaaaagcggatgttgcgccgtctaatctcgctattgtgggtcgttacgtacttagcgcggatatttggccgttgctggcaaaaacccctcctggagctggtgatgaaattcagctcaccgacgcaattgatatgctgatcgaaaaagaaacggttgaagcctatcatatgaaagggaagagccatgactgcggtaataaattaggttacatgcaggccttcgttgaatacggtattcgtcataacacccttggcacggaatttaaagcctggcttgaagaagagatgggcattaagaagtaacatccgtatcggtgttttccacgaaacggtgttgagcaatcgacgccgtttttttatagcttattcttattatattgtcttaaaccggacaataaaaaatcccgccgatggcgggatttttagcatgtgcaatctacaaaagattattgcttgatcaggaaatcgtcgagggatttaccttgctcatccattgcttttttgattacagctggagtacggccctggccagtccaggttttagtttcgccgttttcgtcaacgtagctatattttgccggacgctgagcacgcttagctttggtgccagatttaacggcagcaaggctattcagcagttcgttcgggtcaataccgtcagcgatcagcatttcgcgatattgctgcagtttacgagtgcgctcttcaacttcagcagcagccgcgctttcttcttcgcgacgttcgttaacaacaacttctaatttttccagcatttcttccagcgtttcaagtgtacattctcttgcctgcgcacgaagagtacggatgttgttcagaattttaagtgcttcgctcattgtagtaatctcaaacttatattggggtggtttgttgaggtaataatagagccttaaattcagttgtgcaatagccaggaatgtaaggaattcaaaattgttctttattttgtgccgccaataaatatcttttcataaaattagccagaaaagacgcggcatatagccctatttgcaccgatgatttcgcagcacgtgaggttaaaacttcctgattcatgtcacattttatggggagataatcgtaggctgacgacctttcagtcttctgtattagtcgtgtttacgagaattccctattaagcgaatgatgaaaagtagaacagtcgcaataagagcagggacttagtattgcactatctcctggaggtcaacagagggctattacatgcgcaacaggttaaagattgtgaatagttaccggcagtcatttacccgcttataacaagcgaggcagttgtaatgatagctcagaaggattatgcaaggcttcgtaagggagaacgcatataccacttctgtgcatactgttgagctgaaaaactgacgaattatgataaactccagccaactttatttcatatcattgagggcctgtggctgatggcacagctatatttctactattccgcaatgaatgcgggtaagtctacagcattgttgcaatcttcatacaattaccaggaacgcggcatgcgcactgtcgtatatacggcagaaattgatgatcgctttggtgccgggaaagtcagttcgcgtataggtttgtcatcgcctgcaaaattatttaaccaaaattcatcattatttgatgagattcgtgcggaacatgaacagcaggcaattcattgcgtactggttgatgaatgccagtttttaaccagacaacaagtatatgaattatcggaggttgtcgatcaactcgatatacccgtactttgttatggtttacgtaccgattttcgaggtgaattatttattggcagtcaatacttactggcgtggtccgacaaactggttgaattaaaaaccatctgtttttgtggccgtaaagcaagcatggtgctgcgtcttgatcaagcaggcagaccttataacgaaggtgagcaggtggttattggtggtaatgaacgctacgtttctgtatgccgtaaacactataaagaagcgttagaagtcggctcattaacggctattcaggaaaggcatcgccacgattaataagaatttctttactgacagggtgagcagggcgcttttatcctgtcagttcgttttacgcacttcttccgggctatacacccttctcggcagttttttaacgccgctatacgcctcacagagcgcttatacaccgacattgacttgtaacctgtaaagtacaatatcgctgtgtgtaggcgttatacatcgtcgcaaatatgatgaaggacaatgctgccggtttatggaaaagttgttttgggaaaacaaaaaacggccccagaaggggtaatgccagtcagttaagcaactgactggctctttttcggggctgtggggtatttccagggcctctcctttaccactctcgggaaggccctttcccttcttgtcggtaatttcactggttgtcccatacttgcaagatcgcgcatcagctccggtatacgtcccggggaagcgtatggcgtccgtcatcgacgtcagcagatggcagacttttcctttgcgcgtcacggtcagcaggcgggctgtcacctcatttcccagtcccggccacttttttcgtgcctgcgggctgatgttcagcttcaccagatgatcgcctttacccagttttctgatctcttcatattgcgctccctttctgagagggatcatccagtggcggtgttctcccgccaggctccaggtatttaacagtcctggtgagtaataacctttatccattaacgtcagagtgttatcgccggtttgttctataagttgctcagcaagctcattttcgctgttcttcatcgtgccgaaggctgcagtcgtcagcagatggctggtcagttccatctggcagaccattttgacctgcgggtagagcgccgagttcccggcatgtgtctggcgggggaaggctgcatcgttctctggtgtatccggtgtgcgccagaacacaccatcgatggccagcagggtcaggccgcaccagtgcggatgcggcgtggcgttatgccagagctgcgctgttttcgtgaacacgcggcggacagcctcaattcccagacgctggcgggtctgaataacggcactgggggcaacgaaggggcgattgcccggcagcatgatgtccaggcgattcgcaatctggtgaagaggttctttacgctcaagcgccatgccaacaatacaccagaccatcatttcgaggggaagacggcgcttgtgtagcgttacagtacctgattcggcaaggcaacgagagatgagttcgggggcgaggtaatcccccagagaagtcagtgggttacgcagagaatcgtaacgggataccaaatcaagggcctgtccaatgagcataaaaaaatccggaaacgagtgagcgtttccggattcttacacagccactggatcggtcaactgatccttaactgactggcattaccccttctggggccgtttatgttgccagacagcgctactgattaagcggattttttcgcttttttctcagctttagccggagcagcttctttcttcgctgcagtttcgccttctacataatcacgaccgtagtaggtatccagcagaatctgtttcagctcggagatcagcgggtaacgcgggttagcgccggtgcactggtcatcgaatgcatcttcagacagtttatccacgttcgccaggaagtctgcttcctgaacgccagcttcacggatagatttcggaatacccagttcagctttcagcgtttccagccatgccagcagtttctcgatcttagctgcagtacggtcgcccggtgcgctcagacccaggtggtcagcaatttcagcataacgacggcgagcctgcggacggtcatactggctgaatgcagtctgcttggtcgggttgtcattcgcgttgtagcgaataacgttacaaatcagcagggcgtttgccagaccgtgcggaatatggaactgggaacccagtttgtgcgccattgagtgacatacacccaggaaggcgttcgcaaacgcgatacccgcgatagtcgctgcactgtgaacacgttcacgcgctaccggatttttagacccttcgtggtaggacgctggcagatattctttcagcagtttcagtgcctgcagagcctgaccatcagagaactcagatgccagtacagaaacataagcttccatggcgtgagttactgcgtccagaccaccgaaagcacacagggacttcggcatgtccataaccaggttggcgtcgacaatcgccatatccggggtcagtgcatagtctgccagcggatatttctgaccagtagtgtcgtcagttacaaccgcaaacggagtgacttcagaacctgtaccagaagtggtggtgacagcgatcattttcgctttcacacccattttcgggaacttgtagatacgtttacggatatccataaagcgcagcgccagttcttcgaagtgagtttccggatgttcgtacataacccacatgatcttcgcagcgtccatcggggaacctccacccagcgcgataatcacgtctggtttgaaggagtttgccagttctgcacctttacgaacgatgctcagggtcgggtcagcttctacttcgaagaagacttcagtttcaacgcctgctgctttcaatacggaagtgatctgatcagcataaccattgttgaacaggaagcggtcagtcacgatgagcgcacgtttgtggccatcagtaatcacttcatccagcgcgattggcagggagccacggcggaagtagatagatttcggaagtttgtgccacaacatgttttcagctcgcttagcaacggttttcttgttgatcaggtgtttcggaccaacgttttcagagatggagttaccaccccaggaaccacaacccagagtcagggaaggtgcgagtttgaagttatacaggtcaccgataccaccctgagaagccggggtgttaatcaggatacgagccgttttcattttctgaccgaagtaagaaacgcgagccggttggttatcctggtcagtgtacaggcaagaggtatgaccgataccgcccatagcaaccagtttctctgctttttctaccgcgtcttcgaaatctttagcacggtacattgccagagtcggggacagtttttcatgtgcgaacggttcgctttcatcaacaacggtcacttcaccgatcagaatcttggtgttttctggtacagagaagcctgccagttcagcaattttataggctggctgaccaacgatagccgcgttcagcgcaccgtttttcaggataacgtcctgaacagctttcagctctttaccctgcaacagatagccgccgtgggttgcgaaacgttcacgtactgcgtcataaacagagtcaacaacaacaacagactgttcagaagcacagattacaccgttgtcgaaggttttggacatcagtacagatgcaactgcacgtttgatatcagcagtttcatcgataacaaccggagtgttgcccgcgcctacgccgatagctggtttaccggagctgtatgcggctttaaccatgcccggaccaccagtcgcgaggatcaggttgatgtctgggtggtgcatcagtgcgttagacagctcaacagaaggttgatcgatccagccgatcagatctttcggagcaccggcagcgatagcagcctgtagaacgatatcagccgctttgttggttgcatcttttgcacgcgggtgcggggagaagataatggcgttacgggtcttcaggctgatcagcgatttgaagatagcagttgaagtcgggttagtggtcggaacgataccgcaaataataccgatgggttcagcgatagtgatggtaccaaaagtgtcgtcttcagacagaacaccacaggttttttcatctttataagcgttgtagatatattcagaagcaaagtggtttttgatcactttatcttcgacgatacccatgccggattcggcaacggccattttcgcgagtgggattcgagcatctgcagcagccagagcggcggcgcggaagattttgtctacttgctcttgagtgaaactggcatattcacgctgggctttttttacacgctctacgagtgcgttaagttcagcgacattagtaacagccataatgctctcctgataatgttaaacttttttagtaaatcatctgctcgaatacgagagtatagtcagtgcggtgatgatttgcttaaccgatggaaatcaaaagattactcgcgctcacactcactgtgatttactaaaagagtttaaacattagagttattatctctaatgcgtcacttccaggtggcgtaagcaagattactcacttctgggtactgattacgtgatccaaatcaaatttttgcaaagctgacacctttcagcatggcttttcgccattatagctaacagttaataaattgtagtatgatttgttggctacattagcatgttttgcacaactagataacaataacgaatgatagcaattttaagtagttaggaggtgaaaaatgctgtcaaaaggcgtattgtcagcgcgtcttttcaaccttatttatggctaacattatccggcttttgcttcggagctaaccgtgattcagaccctttttgattttcccgtttacttcaaatttttcatcgggttatttgcgctggtcaacccggtagggattattcccgtctttatcagcatgaccagttatcagacagcggcagcgcgaaacaaaactaaccttacagccaacctgtctgtggccattatcttgtggatctcgctttttctcggcgacacgattctacaactttttggtatatcaattgattcattccgtatcgccggtggcatcctggtggtgacaatagcgatgtcgatgatcagcggcaagcttggtgaggataaacagaacaagcaagaaaaatcagaaaccgcggtacgtgaaagcattggtgtggtgccattggcgttgccgttgatggcggggccaggggcgatcagttctaccatcgtctggggtacgcgttatcacagcattagctatctgtttggtttctttgtggctattgcattgttcgctttatgttgctggggattgttccgcatggcaccgtggctggtacgagttttacgccagaccggcatcaacgtgattacgcgtattatggggctattgctgatggcattggggattgaatttatcgttactggtattaaggggattttccccggcctgcttaattaattcctttcaaatgaaacggagctgtcatgctccgtttacttcgtcattatttttactttgttcctgcgcagttatcaaaagcaaaaggaataggtaaaaatattcttctcaaattacagttagttataaggatttccttaactgcttctcctcaccatcatgttattttcgccacatcataatcctgggcttgctgaagaataattgaaatgatattagtaattccactgcctttggtagaggaaagtgctaaataataatcaattgttaaattattgtgcatttcactactggaactgtaatcagaaaagagagacatgcttaaccaacctctatttgattgaattgaaagatgtttgttaaggcatggatgcaagctatagattctggttcggtcaataaaagagaattgcttaacaattttgcaaaatgtattggcgagtaagaaccgcatttggtactttccgggcaaccgccaggcgattctttattggtaatgagaataattaacaattaaagatcgtcgcgaaagaataatgtgtctcgacaggggagacacagtacgaatcgacataaggtgatcgtctgaatcaccagaataaataaagtcggtgatagtaatacgtaacgataaagtaacctgacagcagaaagtctccgagcctgtgcagggtcccaatccgggattacacatgctggttaataccagtaattataatgagggagtccaaaaaacaatgaccaacatcaccaagagaagtttagtagcagctggcgttttggctgcgcttatggcagggaatgtcgcgctggcagctgatgtacccgcaggtgtcacactggcggaaaaacaaacgctggtacgtaacaatggttcagaagttcagtcattagatccgcacaaaattgaaggtgttccggagtctaatatcagccgagacctgtttgaaggcttactggttagcgatcttgacggccatccggcacctggcgtcgctgaatcctgggataataaagacgcgaaagtctggaccttccatttgcgtaaagatgcgaaatggtctgatggcacgccagtcacagcacaagactttgtgtatagctggcaacgttctgttgatccaaacactgcttctccgtatgccagttatctgcaatatgggcatatcgccggtattgatgaaattcttgatgggaaaaaaccgattaccgatctcggcgtgaaagctattgatgatcacacattagaagtcaccttaagtgaacctgttccgtacttctataaattacttgttcacccatcaacttcaccggtgccaaaagccgctatcgagaaattcggcgaaaaatggacccagcctggtaatatcgtcaccaacggtgcctataccttaaaagattgggtcgtaaacgaacgaatcgttcttgaacgcagcccgacctactggaacaacgcgaaaaccgttattaaccaggtaacctatttgcctattgcttctgaagttaccgatgtcaaccgctaccgtagtggtgaaatcgacatgacttataacaacatgccgatcgaattgttccagaagctgaaaaaagagatcccggacgaagttcacgttgatccatacctgtgcacttactattacgaaattaacaaccagaaaccgccatttaatgacgtgcgtgtgcgtaccgcactgaaactgggtatggaccgcgatatcattgttaataaagtgaaagcgcagggcgacatgcccgcctatggttacactccaccatatactgatggcgcaaaattgactcagccggaatggtttggctggagccaggaaaaacgtaacgaagaagcgaaaaaactgctggctgaagcgggttataccgcagacaaaccgttgaccatcaacctgttgtataacacctccgatctgcataaaaagctggcgattgctgcctcttcattgtggaagaaaaacattggtgtaaacgtcaaactggttaaccaggagtggaaaacgttcctcgacacccgtcaccagggcacttttgatgtggcccgtgcaggctggtgtgcagactacaacgaaccaacttccttcctgaacaccatgctgtcgaacagctcaatgaataccgcgcattataagagcccggcctttgacagcattatggcggaaacgctgaaagtgactgacgaggcgcagcgtacagctctgtacactaaagcagaacaacagctggataaggattcggccattgttcctgtttattactacgtgaatgcgcgtttggtgaaaccgtgggttggtggctataccggcaaagatccgctggataatatctacacccggaatatgtacattgtgaagcactaatggcaatacgtggggcaggagtgtcctgctccacggtgtctgatttttatcgcattacagaaggcacaggccagaaggtagggcaatgttaaaatttattctacgtcgctgtctggaagcgattccgacgctatttattcttattactatttcgttctttatgatgcgcctcgcgccgggcagtccttttaccggcgaacgtactttaccaccggaagtgatggccaatatcgaagcgaaatatcatcttaatgatccgatcatgacacagtatttcagctacctgaaacaactggcgcatggcgatttcggtccatcgtttaagtataaagattattcggtcaatgacctggttgcatccagttttcccgtttctgccaaactgggagccgcagcattttttcttgcggtaatactgggtgttagtgctggcgttattgccgcattaaagcaaaacaccaaatgggactataccgtgatggggctggcaatgaccggggttgttatccccagttttgtggttgcgccattattagtcatgatatttgcgatcattttgcattggctgccgggcggtggctggaatggtggagcgcttaaattcatgatattgccaatggtggcgttatcactcgcctatatcgccagtattgcgcgtattacccgtggctctatgattgaggttttacactccaactttattcgtactgcccgggcgaaagggttacctatgcggcggatcattttacgccacgcattaaaacctgctctgttacccgtgctctcctatatggggcccgcatttgtcggcattattaccggttcgatggtcatcgaaaccatttatggtttaccggggattgggcaattgttcgttaatggcgcattgaaccgtgactattccttagtgttaagtctgaccattctggttggcgcgttaaccattttgtttaatgccattgtcgatgtgctatatgcggttatcgacccgaaaatccgttactgatactggagctcgcgatgatgttaagtaagaaaaacagcgagacgctggaaaatttcagtgaaaagctggaggtcgaagggcgcagcttgtggcaggacgcacgtcgacgttttatgcataaccgtgcggcggttgccagtctgatagtgctggtgctgatcgcgttatttgtaatcttggcaccgatgctttcgcagtttgcctatgacgatactgactgggcgatgatgtccagcgccccggatatggagtccggtcactactttggtactgactcatccggtcgcgacctgcttgtgcgcgttgcgattggcgggcgtatctcactcatggtcggtgttgctgcggcactggtggcagtggtcgtggggacactttatggttcgctttccggttatctgggcggtaaagtggattcggtaatgatgcgtctgctggaaatcctcaactccttcccattcatgttcttcgtcattttgctggtgacctttttcggtcaaaacatcctgctgattttcgtggcgattggcatggtttcctggctggatatggctcgtattgtgcgtgggcaaaccctgagtctgaagcgcaaagagtttattgaggcggcacaagttggcggtgtatcgacgccgggcattgttattcgccacattgtgccgaacgtactcggtgtggtggtggtctatgcgtcgcttctggtgcccagcatgatcctctttgaatctttccttagcttcctgggattaggtacgcaagagccgttaagcagctggggtgcattgctgagtgatggcgcgaactcgatggaagtctctccatggttactgttgttccctgcgggattcctcgtggtaacgctgttttgtttcaactttatcggcgatggcttgcgtgatgccctcgacccgaaagatcgttaaggagtgcagccatgagcgtaattgaaactgcaactgtgccgctcgcacaacaacaggctgacgcactgctgaacgtgaaagatttgcgtgtcacctttagtaccccggatggcgacgtcacggcggtcaatgatttgaatttttcgctacgtgccggagaaacgctgggcatcgtaggtgagtctggttcgggcaaatcgcaaaccgcatttgcgttgatgggcctgttggctgccaacggacgtattggcggatcggcaaccttcaatgggcgtgaaatcctcaatttgccagagcgtgaactcaataaactgcgagctgaacaaatctcaatgatttttcaggacccaatgacttcgttgaatccctatatgcgcgtcggtgagcagttgatggaagtgctgatgctgcataagaatatgagcaaagctgaggcgtttgaagaatcggtgcggatgctcgatgcggtaaaaatgccggaagcgcgtaaacgcatgaaaatgtacccgcacgaattttctggcggcatgcgtcagcgagtcatgattgcgatggcattgctatgtcgacctaagctgctgattgcggatgaacccactactgcgctggacgtcaccgtacaggcgcagatcatgacgctattgaatgaactgaagcgggaatttaataccgccatcattatgattacccacgatcttggcgtggtggcggggatctgcgacaaagtgctggtaatgtacgccgggcgcacgatggaatatggcaacgcgcgcgatgtcttttatcaacccgtacatccttattctatcggtttgctcaacgcggtgccgcgtctcgatgcggaaggtgaaacaatgttgactattccgggtaatccgccaaacctgctgcgattaccgaaaggttgcccgttccagccacgttgtccgcatgcgatggaaatttgtagtagcgcaccgccgctggaagagtttacgcctggccgtctgcgtgcttgctttaaaccagtggaggaactgttatgaatgctgtaaccgaaggaagaaaagtcctcctcgaaatcgccgatctgaaagtgcactttgaaatcaaagatggcaaacagtggttctggcaaccgccgaaaacgctcaaagccgtcgatggtgtaactcttcgcctgtatgaaggggaaacattaggtgtggtaggggaatcgggatgcgggaagtccacctttgctcgcgccatcattggcttggttaaagcgaccgacggtcatgtggcctggttaggtaaagagttgctgggcatgaagcccgatgaatggcgtgccgtacgcagtgatattcagatgattttccaggatccgttggcatcactgaacccgcgtatgaccatcggcgagatcatcgctgaaccactgcgtacttatcatccgaaaatgtcacgccaggaagttcgtgagcgcgtgaaggcgatgatgctgaaagtcggtttgttgcctaatctgattaaccgctatccgcatgagttctccggtgggcagtgccagcgtatcgggattgctcgtgctcttattcttgaaccgaagctgattatctgtgatgagccggtgtcggcgctggacgtgtcaattcaggcgcaggtggtcaacctgctccagcagttgcaacgtgagatgggattgtcattaatttttatcgctcacgacctggccgtggtaaaacacatttccgatcgtgtgctggtgatgtatctcggccatgcggtagaactggggacctatgatgaggtctaccacaatccgctacatccttacaccagggcattgatgtcggcagtccccatacctgatccggatctggagaagaacaaaaccatccagttactggaaggggaattaccgtcgccgatcaacccgccttccggttgtgttttccgtacccgttgtccgattgccggtccggagtgcgccaaaacacgtcctgtgctggaagggagtttcagacacgccgtttcttgcctgaaagtcgatccgctttaaaagcaataagggctgacagttgtcagcccttattcacgccaaaagcgattatttattcccgccagatgatatggcaaagtttgtgatctttttcgcggcataacagaatgcgcgcgaaaacatcgttgatttcaccatcttcactgtccgccagaccaatcaccacttcggcaaaaaagtccgggttcaaatcgaaatcaacatgttcctgccagtcttccgccggatcgaataactccgcgccgccgcgctcttcaaactgaagattgaacagcagaacatcagctggatcgagattgtcggcagccagttcgagaaaaatatcgtaggcctgctcaagcgtttcatcttcagtcaggcgattgtttagatccatatccatagtcactacctgtttaacctctgttggcgacgttttacagcaacgggctgaagaagtaaaacagtcgctcggcgacacgttgccataatggacgttttagccataaacgggcatcgagcagacgagaacgcgaaatataatcgtcctgaacggcggcgaggtctgcaccaaaacctttatcgtcgattgccagggtaatctcgaaatttagccacagactacgcatatcaaggttaacggtgccaaccagacttagttcaccatcgaccagcacgctcttggtatgcagtaacccgccttcaaactgataaattttaaccccagcagccagcagttctgtaaagaatgcgcgactggcccagccgaccagcatcgagtcattttttcgcggaaggataatactgacatccaccccgcgctgcgccgccgtgcaaatcgcatgaagtaaatcatcgcttggcacaaaatagggcgttgtcatgatcaaatattcacgagccgaataagcagcagtcaataatgcctggtgaatgagatcttccggaaagccggggccagaagcaattgtgtgaatggtgtgaccgctggcctgctcaaacggcataatattgacatctggtggcggcggcagaatacgtttcccggtttcaatctcccagtcgcaggaataaataatccccatcgcggtggcgatggggccttccatacgcgccatcagatcaatccattgccctacgcccgcatcttgtttgaagtagcgagggtcgaccatattcatgctgccggtgtacgcgatgtaattatcgatcatgatcatcttgcgatgttggcgcaggtccatacggcgtaaaaacacacgcatcagattgacctttaaggcttcgacaacttcaataccggcattacgcattagctcgggccacgggctgcggaaaaaagccacactcccggcggagtcgagcatcaatcggcaatgaataccacgccgtgcagcggccattaatgattcagccacctggtccgccatgccgccgggctgccagatataaaacaccatctcaatattatggcgcgcgagctggatgtcgcggattaacgcctgcatcacatcatctgactcggtcatcagttgtagctgattccctttgaccccagcgatcccctgacgacgctcgcaaagcttgaataatggcgcagcgacactgctattttcttcggcgaagatatgcttacaggctttaaggtcgttaagccattttgcggtggaaggccacatcgctctggcgcgctcagcgcggcgtttgcctaaatggagctcgccaacggcaagataggcaataattccgactaacggcagaatgtaaataatcaacagccaggccatcgcggagggaactgcgcgtcgtttcattagaatgcgtaaagttacgcctgcaatgagcaaccagtatcccagaatggccaaccaactcaccaacgtataaacggttgtcatagattagaaatccttttgaaagcgcattgttatgagtttacgcatatggattcatctggcaaataaaaacgcgggaaaagcactggtcagcgtcaggggcgggggtataatgaccattctgttgttgcatagagtagttaacatgaagcggagtagaacggaagtggggcgctggcgcatgcagcgtcaggctagccgacgtaaatcgcgttggcttgaggggcagtcgcgccgaaatatgcgtatccacagcatcaggaagtgcattctaaacaaacagcgtaactcgttattgtttgcgatctacaatatctaaatgtactgggcaccattgcggtgcccaataagtttactcttccgtctttaaactctatttttgcgccgattctttactgtcagctttcgtttcttgttcatcgttatcgctgaaaatgccatgaccggagttcaacaacattgaaacgagcatatcattattaatctcttcaccatttaaaactcgcgccagaatttcgctgccaaacagttgtggtgagaggatgatatccggatgtaccatcttaatcttattcaggtttttgctatcactgacggcgagaactgttttgacatcactgctcatatcttttgccgagagtacaacaaacgcgttatctgcatcgttatcactcagcgccagaatggcccggcaacgatcgattcccgctttctttaacactgaactgtcattactgtcaccggggataacatcggcgttatcgcctaagcgttgctcaagttgcttgatatcatcttcaggcaagttgctgataaccgttacgttttgtccgcgttgattcagttgcagaatcgtattgatggcgagaatcgaatgtccgcaaacaataaaatgatctttacgatgcattgtatgattgtttccttttacaagtttgttgaatcccccgcggataagcggaccaaaaattgaggtcatagatgtggcaaaaacggtaatgccggaaataatgaccgaaatagtgaacaatcgtgctgattcagaaacagggacaatatcgccatagccgacggttgacatggtttctatcgaaaaatagaacgcggtcatcaaactttctattcgcggattaaaaccttcgcttaaataaagcgcaccgtaagtggagtaaaacagtaacgtcgtgaaactaataaatgcgaaaattgtcccggctgctgcgctactgtgggagaagtctttgcgcagtatcagcaaaaacaccagcgtaaaaatgcaaaatccaatactaaatttcagccagggataaaaatgcagagtgtaaattagcgctatcaacaacaaaatgatactgattgcccatgcgagctttgcccggaacagtaagccaatggagttcaggacaagaaatacgccgagcataaatagtggggcgtttgccagcaaggagagatccagctctgaaaatgctttgatatggaaaatatcaagcaaattgaccgacataccatagattgttttaaaaataagcaatccatttaaaaagacggccagcgcgagaatgtcgtgccgtagggtcacccataactttgttgctgtttgtttgaatgtagtccagtgactcactgatacctctgtaaccacaattttgtttaattatctcaacgtgcacattttctgaacatacatgcagcgcgtgaatgtgttaaacaatagtagatgactttatccgcagtaatcaaaggttttgagtgagcaactctgcgtcaggaaagggcattttcctgaatatgttcacatcatataaagaaatacagataaagttattatctgcttgtggtggtgaatgcactgaccgacctataaggaaaggccaaacaagaacacggttgcaaaaaccgtgcccttaaatattgaatttctattcagaacactttcttaaatggtttcactgaaacgtgttcatagactcctgccgctacgtacgggtcagcatcggcccaagcctgagctgcttccagcgactcaaattcagcaataacggttgagccagtaaatcccgcagcccctggatcgttactgtctaccgctggcattggaccggcggtcaacaaacgaccttcatcatgcagtaactgtaaacgtgctaaatgtgccggacgaacggaaaggcgtttttcgaggctatcagctttgtcttgagcgtaaataacatacaacacaggcacaactccttgttcgggaaagttgtaaagtacgttatttgaaagggcgaagatctgcaacggaaagatgatgtctttgttaagaccatgcataaagtaaggtcaattacgccaaaaatgacattttcactgatcctgatcgtcttgccttattgaatatgattgctatttgcatttaaaatcggggcctggtttttctactgaaatgattatgacttcaatgacccttgatttacctcgccgcttcccctggccgacgttactttcggtctgcattcatggtgctgttgtggcgggtttgctctatacctcggtacatcaggttattgaactacctgcgcctgcgcagccgatttctgtcacgatggttgcgcctgctgatcttgaaccgccacaagccgttcagccaccaccggagccggtggtagagccagaaccggaacctgagccgatccctgaaccgccaaaagaagctccggtggtcattgaaaagccgaagccgaaacctaagccaaaaccgaagccggtgaaaaaggtggagcagccaaaacgcgatgtcaaacccgtagagtcgcgtccggcatcaccgtttgaaaatacggcacccgcgcgcccgacatcaagtacggcaacggctgcaaccagcaagccggttaccagtgtggcttcaggaccacgcgcattaagccgtaatcagccgcagtatccggcacgagcacaggcattgcgcattgaagggcaggttaaagttaaatttgatgtcacgccagatggtcgcgtggataacgtacaaatcctctcagccaagcctgcaaacatgtttgagcgtgaggtgaaaaatgcgatgcgcagatggcgttatgagccgggtaagccaggcagtgggattgtggtgaatatcctgtttaaaattaacggcactaccgaaattcagtaagcataaagtcaaaagcctccgaccggaggcttttgattattactcaacgggtaaggcgcgaggttttccttcgggatcaaccgcgacatacttaaataatgcttctgttgctttatagcgttgcccgattggttcagacgccacttttttcacccacacttcaatattaatgctgactgatgtcgtccctttctggacacagcgtgcatagcagcacaccacatcgccgaccgcaaccggccgtaagaaagtcattccttcaacccgcacggtcactacacgaccatgggcaatttctttcgccagaatagcgccgccaatatccatttgtgacattaaccaaccaccaaagatgtcaccattggcattggtatcggcgggcatggctaaagtacgtaaaacaagatcgccctgagggacgttatgtgttgtagacatggtaaaaccgacttaaaaggaaaatcacaggcgcgatgctactatgattttcctgaggagaacagaggagatacagcgccagccccgagggactggcagtctggttaggatttatcttcctgcggcatgtggcggtagatatagataccgcttaacaatgtgaagattaaggtaagggcggtcaggccaaagactttaaagttgacccaaatattttgcggcagccagaatgcgatgtagatgtttgccaggccgcaaaggataaagaaaacagcccaggccagattcagcttcgaccataccgattgcggcagggtgagttctttacccagcatccgctgaattagcggctttttcatcacccattggctgactaacagggcacccgcaaacagggcataaatgacagtaaccttccatttaataaactcatcattgtggaagaacagcgttaagccaccgaagacgaccaccagaacaaaagtgatcagggccatcttctcaaccttacgaaagcgaacccagctatatataagcacaatcgccgtggcgacgatgagcgccgcagtagccgcatagatgtcataaatcttgtaaaacgcgaaaaagacaaccagcggtaaaaaatcaagaaactgcttcattttacgattccgtaatcaaatgcttaaggttattggcgaatcaacatatacaggcggaacagatagatgagcaatacggctgaaatcaggttgctcaaggtgttcgccagtacggcaccaatttccggggttaatgcggcaaaagaagaggcaaaaagcagcaacagtgtttttgccagcaaccagctcagtactgcgggtgccaccagacgcatattcgcccatgtcagccgcatactgctacgcatcgaggcaaaaacgcccattttgtcctgtaccagcatcaccggtgccagagccagtaaaatggccatgataattcccggaacgaccaccagcatgatgccaatctgtactaaaagggtagtcagaaaaatcagaataaataactttggcaatatcggcgcactggcaccaatagctcgcagcgcactgactctctgacccgcagacaccagctggataattaatattacgcccccggcgagaatggcgttaccgattaatcctgaaaaagtggacgccgctgaagcctgcagcaaaatttgttgctgttccggtgacatattctgaaccaggtcgaacaacccactactgccgctaacgggtacgccgtcattgagctgcgcaagctgtgcatcactgggtgagaaaacatgccctaacaccactgtgataaacgcacatagcaacgatatcaacagaatggtcataaattgattacggaagaaatttccggtgtcacggtatacggactgcgccgtgatagacatgcactctccttgagttttatgcaggtgttaattagcgggcaattgtaccctggttaagccccgggtggcagcatcaggtcttgtatggaaaagcatatctttgtaaagcggaggtaattgctggccttcaggcgtgggtaaaccgctgcaagtggcgagcgagttaatatttgcgtagcgaaaatatttaaaaattgatttaaatcacattaaccaggattttcaatgcaacttctaaattaatccagatcaataaatggtgaattaccatatgtaatgtgatctgtgtaggatcatttgttaccccaatgtgggtatattcgtcacgtttttataaccataacgacggagcggatatgaaaaagttaacagtggcggctttggcagtagcaactcttctctctggcagtgcctttgcgcatgaagccggcgaattttttatgcgtgcaggttctgcaaccgtacgtccaacagaaggtgctggtggtacgttaggaagtctgggtggattcagcgtgaccaataacactcaactgggcctgacgtttacttatatggcgaccgacaacattggtgtggaattactggcagcaacgccgttccgccataaaatcggcacccgggcgaccggcgatattgcaaccgttcatcatctgccgccaacactgatggcgcagtggtattttggtgatgccagcagcaaattccgtccttacgttggtgcaggtattaactacaccaccttctttgataatggatttaacgatcatggcaaagaggcggggctttccgatctcagtctgaaagactcctggggagctgccgggcaggtgggggttgattatctgattaaccgtgactggttggttaacatgtcagtctggtacatggatattgataccactgccaattataaactgggcggtgcacagcaacacgatagcgtacgcctcgatccgtgggtgtttatgttctcagcaggatatcgtttttaattccgcacaaaaatgaccccgtaattacggggtcaataaggacatggtataaagggtattatttcttcgcttctacgccatcagtttcagagcgaattaagaatttctcagttgtttgcggaatatgctgaattagccagtcggccatgtgcttttcctcatttaaaatcgcttcgatggttggaattgaagctgtatcaccggcattttttgctgctgctaagagtgaggtataacaggcgatttcaaattgctcgaagacatatccgctaatagagcctttgactatttcatcagaagggaatataccaccgattgactgcccaagtgcagccattttactcatggaatctttaatgactgaacgtgaaatgtcattacgatcaagaatagtttccagttgaacaatctggtttttggtttcactaagatgttgttcaatacgagcgcgtagttcaggataattatctatacgactggccatggattcaagcattgattcggcttgcttttccattgcgtgggcgtcacgtaaccagtcatgataatgttcaatacgattcatgaaaatgtcctctttataaaatgactaaaagttaaagttcatatttcaggctttattttcggctttcttatttacgttattaagggccagatcagtcaatttgatgtcggtggccttttcttcttccagggtatctttcagaagcttcgctgctttacgataacctaattgttcagccagcgtcgctaatgtcccgtaactggcaatctcataatgctcgactttctgtgctgcggcaatcagtgcggcatcacgcacttcgtttttctcggtactttcgatgacctcatcagcttcttcaataagaccttccattgccacacatttcatgcgcttaattttcagattcgattctgattccacaatttgatcaatacgttcaatctgtccatgtgtttcctcgaggtgcgcatgaaaagcctgacttaatttttcgtttgatgttgctcttgcgagttttgccagcgcccgggttaattgtttttctgcgctgtatgtatctgaaagcaggtgaatagtttcattaatatgagtgttgtgtgtcgacactcattaaaattagttgttaatgagaattagtcaaattaagcgtaacgagaagaaagtggaaaaatatattttgaggaacgttctggatgtattaacaattgcctgaggaataagtgacttagagaaaattattgattttactggtgttatgttgcgagattaatttgtttgattatattactgttgggcggaaaaaagacgtaagttgacgttcgacaggggtaagcgaaacggtaaaaagataaataataaatgaatttaggatttttccggcttcgttaaagaaagttaaaatgccgccagcggaactggcggctgcggaattaactgcgcgtcgccgctttcatcggttgtacaaaagctttcagtgccgccagcattttctctggctcattaatatgttgctcgatgattttaacgatggccgaaccagaaatcgcgcccgcagctcctgcatcaatcgcggcttttacctgatccggggcggaaataccaaatccctgcaatggaggcgcagcgttgtactctttcagcttcgcaaccagatgattgaggggtaacgcggcgcggttttctgcgccggtcacgcccgctcgcgacagcaaataggtgtaaccacgaccgtaagaggctatctggcgcagcaaatcatcgtcggcattcggcgggcaaataaagataggtgcgacattatgacgcaacgcggcctggcggaagggcgcggactcttccacgggcacatcggcaaccagcaccgaatcgacgccgactttctcgcactcggcataaaactcatcaatgcctttgttaaacaccaggttggcatacatcaaaaggccgatgggaatggtcgggtgcttctggcgaatgagtgccagcatctcaaagcactgcgccggggttactcccgccgcaaaagcacgcagtgtggcgttttgaatcgtcgggccatccgccagtgggtcggagaaggggatgcctaactccagcgcgtcagcaccggcttcaattagcgtatcgataattttcaacgactgctcaatgcccggatcaccgagggtgacgaaaggaacgaatgcgccttctttgcgctccttcaactgggcaaacagagattcgtagcgttccatcagatttcccctcgtgctttcaaaatatcgtgaacggtgaagatgtctttatcgccgcgaccggaaaggttaaccaccagtagctgctctttttccggattttcgcgcatcattttcagcgcatgggccagggcgtgggaggattccagcgccgggatgatcccttcatgcaggcaaagcgttttaaaggcttccagggcttcatcgtcggtaatagacacgtaatcagcgcgtccagtgctgttgagatacgcatgttgcgggccgacggacgggaaatccagcccggcagaaatggagtaagactcttcaatttgcccgtcttcggtttgcatcatcggcgctttcataccgaaatagatgcccacgcgaccatgttttaacggtgcgccgtgctcgccagtttcgataccgtggccgccaggctccacaccaatcaggccgacgtcggtttcgttgatgaaatctgcaaacataccgatggcattcgaaccaccgccaacacaggcgataacggcatccggcaggcgaccttctctttccagaatctgcgctttcgtttcttcgccaatcatccgctgaaactcacgcacaatggtcgggtaaggatgcgggccagctgcggtacccagcatatagtgcgcggtttcataactgccggaccagtcgcgtagcgcctcattacaggcatctttcagggtcgcggaaccgctatgtaccgggatcacttccgcacccattaagcgcatccggaaaacgttgggcgactggcgttcaacgtctttggcacccatataaattcggcatttcaggccgagcagggcgctggcaagggccgacgccacgccatgctgaccggcaccggtttcggcaataatttcagttttacccatccgcttcgccagtaaagcctgaccgagcacctggttagttttatgcgcgccgccgtgcagcaaatcttcgcgcttcagatacagcgtggtgttcgtcccggctgtaatgttctggcatttggtcagcgcggttggacgcccggcatagtttttcagcaggtcgttgaactgagcctgaaattcaggatctttttgcgcgctgacaaaagcttcttccagctggcgcagagcaggcatcaggatttgtggcacgtacatgccgccaaactcaccaaaataggggttaagtaatgttgtcattgttcctttccttaatatgcgcgcagcgtctggaaaaccgaggccaaaagacgtgcgtctttgatacccggttgcgactctacagcagaattaaaatcaagcccggcgcagccggtttgtgccgcttccacgcagttatctgcgcctaagccccccgccagcagaacgttgccaagcgattgaccatttaatagtgaccagtcgaaacgttgtccgctcccgccctgaccgttgtcgaatacatatttatcgatgtgctgaaaatcgcgcgcgggaagagtttcaccgacacttaaagccttccagatggcgacgtgtgctggcagagcctcacgcagattgtcgatatacagctgatcttcattaccatgcagttgcactgccgccagcgataacaccttagctttgtccgccacatcggcaatatcgtgattgcggaacacgccaacatactgcaacggtgctgcagccatcacttcctgcgcctgttcaacgttgacgcaacgcggtgatgtcgcaacaaaaatcaacccaccgtaaatcgcgcccgcgtcataagctgctttagcatcttgcccacgtgtcaggccacatactttattctcacccagcaacacccgacgcacggcggcgttcaaatcgtcatgggccatcaacgccgaaccaatcagaaagccgttagcgaagtggcttaactcgcgcacctgagcgtaagtattgatgccggattcgctgattaccgtcacgttgtgccccagtttcggcgcaagctcgcgggtacggttgagatcaatcgacaaatcgcgcagatcgcggttgttgatgccaacgacctttgcccccaatgcaatggcgcgctccagttcctcttcattactgacttcggtcagcacacccatctccagactgtgggcgacggctgcaagctggcgatattgttcgtcatccagtactgaaagcattaataagcaggcatcggcctggtaatagcgcgccagatagatctggtaaggatcgataatgaagtctttacataaaatcggctgcggggcgatttggctgacgatggggaggaaatcaaagctcccctgaaaatatttctcatcagtcagcactgaaattgccgaagcgtaatgtttataaatggcggcaatgcgtgccggatcgaaatcatcacggatcacgccttttgacggcgacgcttttttacactccagaataaacgccgtgcgtgcgccctgaagtgcatcataaaaatgtcgcgtgctcggctgaacctcattctgaaaactggccagcggttgctgctctttgcgggtttctacccaaatcgccttgtctgcgacgattttcgctaaaacggtttgcatcatttaccctcgtgccgccagtgcggtgactctgtcgtaagcggaaccactgcgcagtacctcaagaacggtttgcgcattggcttgcagatcttcatggccatgcaggcgcattaacatggcgacattcgccgcgacggctgcttcatgggcggcgtcgcctttaccttgtaacaagcgtgttaaaatgtcacggttttcttccggtgttccgcctgccaattgctcctggtggtagggtgtcaggccaaaatcttcagcggtcaattgatagctcttaatttcgccgtcatgtagttcggcaacgattgtcggcgcgtgtaatgaaacttcatccatcccgccgctgtgcaccactgccgcgcgttgataccccagcacgcgcaaggtttcggcaatcggcagcaccagttccggactataaacaccaattagcgccagcggcggatgcgccgggttaatcaatggtcccagcacgttgaacagagtgcgggttttcagttgctggcgaaccggcatcgcatggcggaatccggtgtgatacttcggcgcaaagaggaaacagacgcctaactcatccagcgcctggcgcgatttatcggcgttcatatcaagattaataccgaacgccgccagcagatccgacgagccggatttactggagacgctacggttgccgtgtttcgccactttcagcccgcaggccgcggcgacaaacgcactggcggtagaaatattgatgctgttgctgccgtcaccgccagtaccgacgatatcggcaaacagataatccgggcgcgggaatggcgcggcgttttccagtagcgcggttgctgccccggcgatctcgttcgggtgttcaccgcgaattttcatgctcaccagcgccgccgccagttgttccggcttcagctcgccacgtaccaccgctgaaaacagctggtggctttcttgttggctaagcgtctgtgcctgatacagtttttccagaatcggttgcagcgtgttggttggctctagtttctgctgcgcccaggccagcgtttgttccagcaggcgagcgccctgggtagtaagaatggattccggatggaactggaatccacaaacgcgatctgcatcgtgacgcaccgccatcaccatgccattaaaatgggcgttgatggttaaaccggccggaatgttactgccaaccagcgagtgataacgcgccactggcagcgggtttgttaatccggcaaacatcgcctgaccgtcatgttcaatgctcgacgctttaccgtgaagaatttcgcccgcctgaccgacatagcccccgtaagcttcgacaatcgcctgatgtccgaggcaaatgccaataattggcagcttgccacgcaagcgggtgaggagttccggcatacaaccggcttcgctcggcacaccggggccaggagaaagcatcagcaccggattgctcatcgtcgccaggcgttcaattaaggtctgcgccggaatatggttgcggtaaatcaccacgttatgaccattgctgcgcaactgatctgccaggttgtacgtaaaagagtcgatattatcgagcagcagaatgtcagccattagaacgtctcctgtgcatgatgcgcggtggcaatagcgcgcagtacagcgcgggctttattacgagtttcgtcggcttccgactgcggaacagaatcaaggactacgccagcaccggcttgcacggtggcgataccgttttccaccagcgccgagcggatcacaatgcaggtgtcgagatcgccatgcgcggtaaaataacctaccgcgccgccgtagctgccgcgtcgacgaccttctgcttcggcaattaactgcatagcgcgtactttcggtgcaccgcttaacgtccccatattcatacaggcgcggtaagcgtgcagggcgtcgagatcgtggcgcagctcaccaacaacgcgggagactaggtgcatcacgtaagagtaacggtcaactttggtgagatcggcgacgtagcggctgccgggtgtgcaaatgcgtgccaggtcattacgggcgagatccaccagcatcagatgttcagaaagctctttatgatcggtacgcatctccagttcgatgcggctgtcgaggtctctgtccagcgaaccatcggcacgacgaccgcgtggacgtgttccggcaatcgggtaaatctcaatctggcggctggtggcgtcatacttgagcgaactttccggcgacgcgccaaacagggtgaaatcattatcctgcataaaaaacatgtacgggctgggattactctttttcagcacgtaataggctgccagcggtgacgggcagggcagagagaaacggcgagatggcaccacctggaaaatttctccggcgcgaatcgctttttgcaacaaacgcactacaccaccgaactcttcatcgctctggttacattcacaacgcatatgcggcacggaaaccaccggcagcggcggcgcggcttcggtcagttgctgacgtagttcgttcaggcgagcagtgagacgttgtttttcttcttcattcggagcaaacaggctggcctgaatacgagtgctttttttctgatggtcaatcaccatcagcgtttcagcgagataaaaacagaaatcagggcagctattttccgctgacagttgcggtaaattttcaaatcccgccacaaggtcataagagaacaggccgccgaagaacattgcttctcgttcttccttcggtacattcaacagattctgtaataagcggaaagcgtcaaaaaccgaaagggagcataagcgggcgtcttcatccagcagtggactgacaggcgggaagcgcagtacgcggcagtttggtgattgttcattttccacacccgcaggcaaggcgttatccagtagtgtcaacagggcttctccattgccggaaagcgcctggattgtgacagtgtcacttaatgctgtaatgcgcagcgcactgtctaccagcagcaggctttttaaatcatctttgctgtcgatatctgcggattccagcagcagcgttgccggacgatccccacacaactggtgaaaaagcgcagtcgggttgtcgcgataagcgccttcgcaggttagcagttcgagagtcggtttttgtgtttgcattgttattctctaattttgttcaaaaaaaagcccgctcattaggcgggctgggtatctgattgctttacgcatggtgaatacactgcccgtttcaggaagtgcgccaccaacctttcagtacgaaaattgctttcattgtcgataccctttttacgtgaacttgcgtactagttaactagttcgatgattaattgtcaacagctcatttcagaatatttgccagaaccgttatgatgtcggcgcaaaaaatattatccagaacgggagtgcgccttgagcgacacgaattacgcagtgatttacgacctgcacagccataccacagcttccgatggctgcctgacgccagaagcattggtgcaccgtgcagtcgagatgcgcgtcggcaccctggcgatcaccgaccatgacaccacagctgcaattgcaccagcaagagaggaaatttcacgttcgggactggcgctgaatcttattcctggtgtggaaatttccacggtctgggaaaatcatgaaattcatattgtcgggctgaatattgatattactcatccgctaatgtgtgagttcctcgcgcagcagacagaacggcgcaatcagcgggcgcagctgattgccgaaagacttgaaaaagcgcaaatacctggggcactggaaggcgcgcaacgactggcgcagggcggtgcggtgacgcgcggtcattttgcgcgtttccttgtggagtgcggaaaagccagttcaatggcggatgtctttaaaaagtatctggcgcgcgggaaaaccggatacgttccgccacagtggtgtacaatagagcaatctattgatgtcattcatcattctggcggtaaggcggtgctagcccatcctgggcggtacaatcttagtgctaaatggctgaaaagattggttgcgcattttgccgaacaccacggcgacgcgatggaagtcgcgcagtgccagcaatcgcccaatgaacgcacccagctggcgacacttgcgcgtcagcatcatttatgggcatcacaaggatctgattttcatcagccatgcccgtggatcgaactgggtcgtaaactctggctgcccgcaggcgttgaaggcgtctggcagctatgggaacagccgcagaacaccacagagagggaattatgagccagtttttttatattcatcctgataacccgcagcaacgcctgatcaaccaggcggtggagatcgtgcgtaaaggcggggtgattgtttatccaactgattccggctatgcgctcggctgtaaaattgaagataaaaacgcgatggagcgtatttgtcgtattcgccagctgccggacggtcacaactttaccctgatgtgtcgcgatctttctgaactctcgacctattcatttgtcgataacgttgcgtttcgtttgatgaaaaacaacacgccaggcaactataccttcatcctgaaggggacgaaggaggtgccacgccgtctgttgcaggaaaaacgcaaaaccatcggtatgcgcgtgccgtctaacccgattgcgcaggcgctgcttgaagcactgggcgaaccgatgctttccacttcgctaatgctgccaggcagtgaatttaccgaatccgatccggaagaaattaaagaccgtctggaaaaacaggtggatttgattattcacggcggctatctcgggcagaaaccaacaacggttattgatctcaccgatgatacgccggtcgtggtgcgtgaaggcgtaggtgatgtgaagcctttcttataacaaattgcgttccacggatggaaaatgatggcagggatatatcgctgcattttgctgttgatagttgggctttttttctcttcgttgagttatgcgaaaaacacggagatcccttcttatgaagaagggatctcgctctttgatgttgaagccactctgcaaccgaatggggtgctcgacatcaaagagaacattcattttcaggcgcgaaatcagcagattaagcacggattttatcgtgatttaccgcgactctggatgcagcctgatggggacgctgcactgctgaactatcatattgttggcgtcacccgtgatggtattcctgaaccctggcatcttgactggcatatcgggttaatgagtattgtcgtgggcgataaacaacgtttcttgcctcaaggcgactatcattatcaaattcattatcaggttaaaaatgctttcctgcgtgagggggattctgatctgctaatctggaacgtgaccggtaaccactggccgtttgaaatttataagaccctattttcactcaagttgcctgatattgcgggtaatccatttagcgaaatcgctctctttactggagaagagggcgacacatatcgaaatggccgcatccttgaggacggaagaattgaatctcgcgatccgttttatcgtgaagatttcacggtcctctaccgctggcctcacgcattacttggtaatgccccggctccacaaacgacgaatattttcagtcatcttcttttaccctctacgtcatcgttgttaatttgctttccgagtctgttcctggcgtgtggatggttatatctctggaagcgcaggccgcaatttacgccggtagatgtgattgaaaccgatgtcattccgccagattacacgcccggcatgttacgtcttgatgcgaaactggtttacgacgataaaggtttttgcgccgatatcgtaaatctgattgtgaaaggaaaaattcatctggaagatcattatgacaagaaccagcaaatcctgattcgtgttaatgaaggcgcgaccagaaataatgcggtattactgcccgcagagcagttattactggaagcgttatttcgtaaaggcgacaaggtcgttcttacggggagacgcaacagagtcttacgcaaggcatttttacggatgcagaaattttatctgccgcgtaaaaagtcttcgttttaccgacctgatgcgtttttgcaatggggcggaatggcaatattggcggtcattctctacggtaacctgagtcccgtaggctgggaaggaatgagtctggtgggcgatatgtttattatgatctgctggcttcttccttttttattttgttcccttgagcttttgtttgcccgcgatgatgacaagccttgcgttaatcgtgtcatcatcactttgtttttaccactgatttgttcaggcgtggccttctattctctctacatcaatgtcggagatgtattcttttactggtatatgccagcgggttattttagcgctgttttcctgaccggttatctcactggcatggggtatatttttctgccaaagtttacccaaaccgggcagcaacgttatgcccacggtgaagctatcgttaactatcttgcgcgtaaagaggcggcaacacacagtgggcggcggcggaaaggggaaacacggaaactggattacgcgttgttaggttgggctatatcggcaaatttggggagggaatgggcgttacgcatcgccccttcgctttcttcggcgatttgcgctccagagattgcccgtaacggcgttttattctcattacagacgcacctgagttgcggggcctataccagtttgttggggcggagctattctggtggtggttctggcgctggtggcggaggcggtggtggttggtaaccaaatcgacgttaatcgaaacaagctttaaccataaagatagtgtagtatgttgcgcctcaaagccaggccagttaaaacgtcgagtcgttgacttaaggcctgaagagttcaaacagactttactatcagtgagtcagatgtaagttctgactcattgttgcacaaaagcatatcagacgcctgggaaggcgacaccaaaaggaagctctatgagcgaaaagctacagaaagtgctggcgcgtgccggccacggttctcgccgtgaaatcgaatctattattgaagccggtcgtgtgagtgttgatggcaaaattgctaaactcggcgatcgcgttgaaattacccctggactgaaaatccgtatcgatggtcacctgatttcggtacgtgagtccgctgaacaaatttgtcgcgttctggcctattacaaaccggaaggtgagttgtgtacccgtaacgatccggaagggcgtccaacggtgtttgaccgtctgccaaagctgcgtggcgcacgctggattgccgtaggtcgtctggacgttaacacctgtggtctgttgttgttcaccaccgacggtgaactggcaaaccgtttaatgcatccaagccgtgaagttgaacgtgaatatgccgtgcgtgtatttggtcaggttgacgacgcgaaactgcgtgatttgagtcgtggcgtgcagctggaagatggtccggcagcctttaaaaccatcaagttcagcggcggcgaagggatcaaccagtggtacaacgttactctgaccgaaggccgtaaccgtgaagttcgtcgtctttgggaagcggttggtgtgcaggtgagccgcctgattcgtgttcgttacggtgatatcccactgccaaaaggtctgccacgcggtggctggacggagctggacctcgcccagactaactatctgcgcgaactggtggaactaccgccagaaaccagctctaaagtcgctgtagaaaaagaccgtcgtcgtatgaaggcgaatcagattcgtcgtgcggtgaaacgtcacagtcaggtgagcggcggtcgtcgttctggtggacgtaataataacggttaatcaaagtatgccggacgtcatatccggcatttttacagattagtaatcaatccctatctgcgcttttacaccggcatcaaacgcatgtttgacggggcgtaattcacttaccgtatccgccagttcaagaatatcccgatgacaaccacgacctgtgataatcaccgtctgttgatgtggacgttcatttaacgcctgcaccacttcttccagtggcaaatagtcatacgccaccatatacgtcagttcatcgagcaaaaccatatccagtgaggaatcagccagcatccgctttgcatgttgccagacttcgcggcaggcggcggtatcagactctcggttttgtgtatcccaggtaaagcccgttgccattacctgaaactcaacgccgtgtggctccagcagatttcgttcaccattaggccaggtgcctttaataaactgcacgacgcccactttttttccgtgaccaactgcgcgtgttgccgtaccaaatgccgcggtggttttgccttttccattgccggtaaagacgatgataataccgcgttcatcctgggcctgggccacacgagcatctactttttctttcactcgctgctgacgctgttggtagcgttcatcactcattgggaaattcctggtttacggcccggttgggcgtcaaaggtcatgccggttttacggcggctgtcatcgcccatcagccagaggtagagcggcatgatatcagcgggggttttaagtttctgtggatcttcggtcgggaaggcgctggcccgcattgcggtgcgcgtaccgcctgggttaatgcagttgacacgcaggcgctgctgatattcatcggccagtacctgcatcatcccttcggtggcaaatttcgacgctgcatatgcgccccagtttgcacgcccctgacgtccaacgcttgatgaggtaaagaccagtgaaccggcatccgatttgagtaataaaggaagcagtgcctgtgtgagcataaaggtggcattaacgttgacctgcatgacgtcctgccagacctgcggatcttgttcgctcattgggcaaacatcgccgagcaatccggcattatgcaaaacaccatccagacgcggataattaacggcaatgcgctgtgccagttgttggcaatcttcggacgtgcaggttagcaaatcgagaataaaccactgtggctgacgtccagtttcttcgtttatgtggctggctacctgacgtaatttttcttcattacggcccaaaagaatcactgtcgcaccatagcgtgcatacgtcatcgctgcttcacgaccaattccatcgctggctcccgtcaccaggataatgcgatcattgagtaaatcttgttttggctggtaatgcatggctactcctcaacgacgttgtctgtcgcgctgccagtgtactttatgactttggggctttatgcctgaaacagaagggcatttcaatcagcctggggcgataacaccgcaaaatggatactttgtcatactttcgctgcaataacatctctgcgagacggctaaacatgcctgttgtaaactgtgagccaaagcgttgtttaaccaaggtggggactcgtggaattgttgtctgaatatggtttgtttttggcgaaaatcgttaccgttgtgctagcgattgcggcgattgccgccattattgtcaatgttgctcaacgtaataaacgccagcgtggcgagttacaggtcaacaatctcagcgaacagtataaggagatgaaagaagaactggccgcggcgctgatggatactcatcagcaaaaacagtggcacaaagcgcagaagaaaaagcacaagcaagaagcgaaagccgcaaaagcgaaagctaaactgggcgaggtggcaactgacagtaaacctcgcgtctgggtgctggattttaaaggcagcatggacgcccatgaagtgaactcgctacgtgaagagataacggcggtactcgcagcattcaaaccgcaggatcaggttgtgctccgtctggaaagcccaggtggcatggtgcatggttacgggttggcggcttcgcagttgcagcgtctgcgtgataaaaacattcctttaactgttacggtagacaaagtcgctgccagcggcggttacatgatggcctgtgtggcggacaaaattgtttccgcaccgtttgctattgtgggttccattggggtggtggcgcaaatgcccaactttaaccgcttcctgaaaagcaaagatattgatatcgaactgcacaccgccgggcagtataagcgcacgctgacgttgctgggtgaaaataccgaagaagggcgggagaaattccgcgaagagttgaacgaaacgcatcagttatttaaagattttgtgaagcgtatgcgtccgtctctggatattgaacaggtggcaacgggtgaacactggtacggacaacaggcagtagagaaaggcctggttgatgaaatcaacaccagtgatgaagttattcttagcctgatggaaggccgggaagtggtcaatgtacgctatatgcagcgtaaacgactcattgaccgattcaccggcagcgcggcagagagcgccgatcgattgttgttacgctggtggcagcgtgggcaaaagccgttgatgtaaaagacaaacgcgaggataagacctcgcgttttgctttaatcaaccaggtgatatttttctgaaagcacatgggccaggtgtttgaacatattaaacaccgcggtgcttttggcagttggtaatccttgttcatctaaaaagtagtcgccggtaaataccagcacgccattacgctgcgtgacgccggtggcttcaatccctgcgagcgtatcctcatgctcacgaatgattttgttggcctctttcaacagcgtttcgcggtcgatgggttgagtctctttgttcattatttactccttaaacaaggacattagtctacgccaggcatggcttgcagacaaatataccacgctggtggcaagagcgccttactggcaactttggattttgcatgctaataaagttgcgtatcggattttatcaggtacagtgtgacgctttcgtcaatctggcaatagatttgcttgacattcgaccaaaattccgtcgtgctatagcgcctgtaggccaagacctgttaactcagtcacctgaattttcgtgagcagagtcacgacaaggggttgatatccgcagagagcgagtccatatcggtaactcgttgccagtggaaggtttatcaacgtgcgacgcattcctggaagaatcaaattaggtaaggtgaatatgggtaaagctcttgtcatcgttgagtccccggcaaaagccaaaacgatcaacaagtatctgggtagtgactacgtggtgaaatccagcgtcggtcacatccgcgatttgccgaccagtggctcaactgccaaaaagagtgccgactctacctccaccaagacggctaaaaagcctaaaaaggatgaacgtggcgctctcgtcaaccgtatgggggttgacccgtggcacaattgggaggcgcactatgaagtgttgcctggtaaagagaaggtcgtctctgaactgaaacaactggctgaaaaagccgaccacatctatctcgcaaccgaccttgaccgcgaaggggaagccattgcatggcacctgcgggaagtgattggtggtgatgatgcgcgctatagccgagtggtgtttaacgaaattactaaaaacgcgatccgccaggcatttaacaaaccgggtgaactgaatattgatcgtgttaatgcccagcaggcgcgtcgctttatggaccgcgtggtggggtatatggtttcgccgcttctatggaaaaagatcgctcgtggtctgtctgccggtcgtgtgcagtcggtggcggtccgcctggtggtcgagcgtgagcgtgaaattaaagcgttcgtaccggaagagttctgggaagtcgatgccagcacgaccacgccatctggtgaagcgttggcgttgcaggtgactcatcagaacgacaaaccgttccgtccggtcaacaaagaacaaactcaggctgcggtaagtctgctggaaaaagcgcgctacagcgtgctggaacgtgaagacaaaccgacaaccagtaaacctggcgctccttttattacctctacgctgcaacaagctgccagcacccgtcttggttttggcgtgaaaaaaaccatgatgatggcgcagcgtttgtatgaagcaggctatatcacttacatgcgtaccgactctaccaacctgagtcaggacgcggtaaatatggttcgcggttatatcagcgataattttggtaagaaatatctgccggaaagtccgaatcagtacgccagcaaagaaaactcacaggaagcgcacgaagcgattcgtccttctgacgtcaatgtgatggcggaatcgttgaaggatatggaagcagatgcgcagaaactgtaccagttaatctggcgtcagttcgtagcctgccagatgaccccagcgaaatatgactccacgacgctgaccgttggtgcgggcgatttccgcctgaaagcacgcggtcgtattttgcgctttgatggctggacgaaagtgatgcctgcactgcgtaaaggcgatgaagatcgtatcttaccggcagtcgataaaggcgatgctctgacgctcgttgaactgacaccagcccagcactttaccaagcctccagcccgtttcagtgaagcatcgctggtcaaagagctggaaaaacgcggtatcggtcgtccttctacctatgcgtcgatcatttcgactattcaggatcgtggctatgtgcgagtagaaaatcgtcgtttctatgcggaaaaaatgggcgaaatcgtcaccgatcgcctggaagagaatttccgcgagttaatgaactacgatttcaccgcgcagatggaaaacagcctcgaccaggtggcaaatcacgaagcagagtggaaagctgtactggatcacttcttctcggatttcacccagcagttagataaagctgaaaaagatccggaagagggtggtatgcgcccgaaccagatggttctgaccagcattgactgcccgacttgtggtcgcaaaatggggattcgcacagcgagcaccggggtattccttggctgttctggctatgcgctgccgccgaaagagcgttgcaaaaccaccattaacctggtgccggaaaacgaagtgctgaacgtgctggaaggtgaagacgctgaaaccaatgcgttgcgcgcaaaacgtcgttgcccgaaatgcggcacggcgatggacagctatctcatcgatccgaaacgtaagttgcatgtctgtggtaataacccaacctgcgacggttacgagatcgaagagggtgaattccgcattaaaggttatgacggcccgatcgttgagtgtgaaaaatgtggctctgaaatgcacctgaaaatggggcgtttcggtaaatacatggcctgcaccaacgaagagtgtaaaaacacacgtaagattttacgtaacggcgaagtggcaccaccgaaagaagatccggtgccattaccggagctgccgtgcgaaaaatcagatgcctatttcgtgttgcgtgacggtgctgccggtgtgttcctggcggccaataccttcccgaaatcgcgtgaaacgcgtgcgccgctggtggaggagctttatcgcttccgcgaccgtctgccggaaaaactgcgttatctggccgatgcgccacagcaggatccggaaggtaataagaccatggttcgctttagccgtaaaaccaaacagcaatatgtctcttcggaaaaagacggaaaggcgactggctggtcagcattttatgttgatggcaaatgggttgaagggaaaaaataacctttaattctgtcgggtttttataaacaaagggccgcgaaagcggcccttttttattgcatattattttttcttcacacctatacactaaggctataaatgatatagtggttatagttagcaccttttttattattaaatcgtattagtcacccgcctggtgtgacgaaaaaacgatgttctgatggcgtctaagtggatggtttaacatgaaattacaacaacttcgctatattgttgaggtggtcaatcataacctgaatgtctcatcaacggcggaaggactttacacatcacaacccgggatcagtaaacaagtcagaatgctggaagacgagctgggcattcaaattttttcccgaagcggcaagcacctgacgcaggtaacgccagcaggacaagaaataattcgtatcgctcgtgaagttctgtcgaaagtcgatgccataaaatcggtcgccggagagcacacctggccggataaaggctcgttgtatatcgccaccacgcatactcaggcacgctatgcgttaccaaacgttatcaaaggctttattgagcgttatcctcgcgtttctttgcatatgcaccagggctcgccgacacaaattgctgatgccgtctctaaaggcaatgccgatttcgctatcgccacggaagcgctgcatctgtatgaagatttagtgatgctaccgtgctaccactggaatcgggctatagtagtcactccggatcacccgctggcaggtaaaaaagccattaccattgaagaactggcgcaatatccgttggtgacatataccttcggctttaccggacgttcagaactggatactgcctttaaccgcgcagggttaacgccgcgtatcgtcttcacggcaacggatgctgacgtcattaaaacttacgtccggttagggctgggggtaggggtcattgccagcatggcggtggatccggtcgccgatcccgaccttgtgcgtgttgatgctcacgacatcttcagccacagtacaaccaaaattggttttcgccgtagtacttttttgcgtagttatatgtatgatttcattcagcgttttgcaccgcatttaacgcgtgatgtcgttgatgcggctgtcgcattgcgctctaatgaagaaattgaggtcatgtttaaagatataaaactgccggaaaaataatttcttgcgttattttcggcaccttttatgtagcgaaggtgccggaatatattctcctttgttacttatttgtatccggtgcacaatatttttatccctcatatttatagggtaaattacctgtaaagtagtgtctaattacacacctcgcaaactccagttttcaaatatctatttcaggtcaaaagattgaattattcactggagacgattcgtaaattcgctggatttttgactaaagtttctttaggatttgtctcatcgtatgattaattacaccaatcgttcaacgtcttgctgataagtgatggcgattatatgaggttagcaatgccttctggaaatcaggaaccccgccgcaatcctgaattaaaacgtaaagcctggctggcggtttttcttggttctgcacttttctgggtggttgtcgcactgcttatttggaaattgtggggataactatggtcggtcaggagcaactggagtcgtcaccattatgtcagcatagtgacaatgaaccagaagcaaaacgggaatgttccgtcgttattccagacgactggcaactaacatcgcagcaacaagcctttatagaactgtttgctgaagatgatcagccgaaacaataattatcatcattcttattacccatttttaatgaattacagggcttttaatacaccgcagcaataacaggttgagttatctcaacacaaagtaataaccgttaagggtgtagcctatgatcaacacaaatatgaaatattggtcctggatgggcgcattttctctgtcgatgctcttctgggccgaactcctctggatcattactcactgatccctgaccccgctgtttgctttgcctcaaggtttctcctcttttatcaatttgggttgttatcaaattgttacgcgatgtttgtgttatctttaatattcaccctgaagagaatcagggcttcgcaaccctgtcattaaggaggagctatgtcgtcaaccctacgagaagccagtaaagacacgttgcaggccaaagataaaacttaccactactacagcctgccgcttgctgccaaatcactgggcgatatcacccgtctacccaagtcactcaaagttttgctcgaaaacctgctgcgttggcaggatggtaaatcggttaccgaagaggatatccacgcgctggcgggatggctgaaaaatgcccatgctgaccgtgaaattgcctaccgcccggcaagagtgctgatgcaggactttaccggcgtacctgccgttgttgatctggcggcaatgcgcgaagcggttaaacgcctcggcggcgatactgcaaaggttaacccactctcaccggtcgacctggtcattgaccactcggtgaccgtcgatcgttttggtgatgatgaggcatttgaagaaaacgtacgcctggaaatggagcgcaaccacgaacgttatgtgttcctgaaatggggaaagcaggcgttcagtcggtttagcgtcgtgccgccaggcacaggcatttgccatcaggttaacctcgaatatctcggcaaagcagtgtggagcgaattgcaggacggtgaatggattgcttatccggatacactcgttggtactgactcgcacaccaccatgatcaacggccttggcgtgctggggtggggcgttggtggcatcgaagcagaagccgcaatgttaggccagccggtttccatgcttatcccggacgtagtgggctttaaacttaccggaaaattacgtgaaggtattaccgccacagacctggttctcactgttacccaaatgttgcgcaaacatggcgtggtggggaaattcgtcgaattttatggtgatgggctggattcactaccgctggcggatcgcgccaccattgccaatatgtcgccagaatatggtgccacctgtggcttcttcccaatcgatgctgtcaccctcgattacatgcgtttaagcgggcgcagtgaagatcaggtcgagttggtcgaaaaatatgccaaagcgcagggcatgtggcgtaatccgggcgatgaaccaatttttaccagtgtgttagaactggatatgaatgacgttgaagcgagcctggcagggccaaaacgcccacaggatcgcgttgcactgcccgatgtaccaaaagcatttgctgccagtagcgaactggaagtgaatgccacgcataaagatcgcctgccggtcgattatgttatgaacggacatcagtatcagttacctgatggcgctgtggtcattgctgcgataacgtcgtgcaccaacacctctaacccaagtgtgttgatggccgcaggcttgctggcgaaaaaagccgtaacgctgggcctcaagcggcaaccgtgggtcaaagcgtcgctggcaccgggttcgaaagtcgtttctgattatctggcaaaagcgaaactgacaccgtatctcgatgaactgggatttaaccttgtgggatacggttgtaccacctgtattggtaactctggaccgttgcccgatcctatcgaaacggcaatcaaaaaaggcgatttaaccgtcggtgcagtgctgtccggcaaccgtaactttgaaggccgtatccatccgctggttaaaaccaactggctggcctcgccgccgctggtggttgcctatgcgctggcgggaaatatgaatatcaacctggcttctgagcctatcggccatgatcgcaaaggcgagccggtatatctgaaagatatctggccatcggcacaagaaattgcccgtgcggtagaccaagtctccacagaaatgttccgcaaagagtacgcagaagtttttgaaggcacatctgagtggaaggaaattaacgtcacacgatccgatacctacggttggcaggaggattcaacctatattcgcttatcgcctttctttgatgaaatgcaggcaacaccagcacctgtggaagatattcacggtgcgcggatcctcgcaatgctgggggattcagtcaccactgaccatatctctccggcgggcagtattaagcccgacagcccggcgggtcgatatctacaaggtcggggtgttgagcggaaagactttaactcctatggttcgcggcgtggtaaccatgaagtgatgatgcgcggcaccttcgccaatattcgcatccgtaatgaaatggtgcctggcgttgaaggggggatgacgcgccatttacctgacagcgatgtcgtctctatttatgatgccgcaatgcgctataagcaggagcaaacgccgctggcggtgattgccgggaaagagtatggatcaggctccagccgtgactgggcggcaaaaggtccgcgtctgcttggtattcgtgttgtgattgccgaatcgtttgaacgaattcaccgttcgaatttaattggcatgggcatcctgccgctggaatttccacaaggtgtgacgcgtaaaacgttagagcttaccggggaagagaagattgatattggtgatctgcaaaatctacaacccggcgcgacggttccggtgacgcttacgcgcgcggatggtagccaggaagtcgtaccctgccgttgtcgtatcgacaccgcgacggagttgacctactaccagaacgacggcattttgcattatgtcattcgtaatatgttgaagtaacgagtatttgcttgccggttattttgcttccggcaagcaaattaattacacaatgcaagagggttatttgttcagcaaatgacccattttctcggctttggtatcgagataatgttcgttattggggttacgacctacaatcaacggtacgcgttcaataatattaatccctgcttcggtcagaatttcgacttttttcgggttattggttaacaagcggacttcattgacgccaaggagtttgaacatatcagcgcaaagagtgaagtcgcgctcatcagcggcgaagcctaactggtggttagcctctacagtatcgtaaccttgatcctgcagtgcgtaagcgcggattttattcagcagaccaatgttacgaccttcctgacggtgatacagcaaaataccacggccttcctcggcaatttgcgtcaatgccgcttcgagctggaagccacaatcgcagcgcaagctgaacagggcgtcaccggtcagacattcggaatggacgcgcgcaagtaccggggtatgcccggaaatatcgccatagactagcgcgacatgatcgtgtccggttgccagttcttcaaatcccaccatcaggaaatcgccccatggggttggcagtttggcttctgccacacgtttaagctgcatgaaattctccagataatgctggttctgtattggcttattttgccataacgagaaggggttcacctaatcacgacgcgtcgatcgttcacggaatggcacaaatctgtcaatttttcctggaactggcattttcagttatgattgtgggacttatcaaaaaggagaggccatgcgttcgattgccagacgtaccgcagtgggagctgcactattgcttgtcatgccagtagccgtatggatttctggctggcgttggcaacctggagaacaaagttggttactaaaagcggctttttgggttactgaaactgtcacccagccctggggcgtcattacacatttgattttattcggctggtttctctggtgtctgcgttttcgcattaaggctgccattatgttatttgccattctggcggcggcaatccttatgggacaaggcgttaaatcctggatcaaagacaaagtccaggaaccacgaccttttgttatgtggctggaaaaaacacatcatattccggttgatgagttctacactttaaagcgagcagaacgcggaaatctggtgaaagaacagttggctgaagagaaaaatatcccacaatatttgcgttcacactggcagaaagagacggggtttgcctttccttccggtcacacgatgtttgctgccagttgggcactgctggccgttggtttgctgtggccgcgtcggcgaacgttaaccattgctatcttgttggtctgggcaacgggagtcatgggaagccgcctgctgctcgggatgcattggccacgcgatctggttgtagctacgttgatttcctgggcgctggtggcggtggcaacgtggcttgcgcaacgaatttgtgggccattaacaccacctgcggaagaaaatcgcgaaattgcacaacgagaacaagaaagttaacgctggttgattttccgaatttagcccttaaatcatcaacaatgcgcgtggatgccatttcgcagacggcgcgaaaatggtactttaaagggctattgcggtaagttgaccataatttattcgctctaaccacataacgggaagtaatgtgaaatatttactcattttcttactggtgttagcgatcttcgtgatttcggtcacgttgggtgcgcagaacgatcaacaggtgacgtttaattatctgttagcgcaaggggagtaccgtatttccacattgctggcggtattgtttgctgcggggtttgctatcggttggttgatttgtggcctgttctggctgcgagttcgtgtttccctggcgcgcgctgaacgtaaaataaagcgactggaaaaccagctttcacccgcgactgacgtggctgtagcgccgcactcgtctgcgtcgaaggaataactttctatgctggagttgttgtttctgcttttgcctgtagccgctgcctatggctggtatatgggccgcagaagtgcgcaacaaaacaagcaagatgaagccaaccgcttgtcgcgtgattacgtagcgggggttaacttcctgcttagtaatcaacaggataaagcggtagacctgtttctcgatatgcttaaagaggatacaggtaccgttgaagcccaccttacgctcggaaacctgttccgttcgcgtggcgaagttgatcgcgctattcgcatccatcagaccctaatggaaagcgcctcgctgacctatgaacagcggcttttggcgattcaacaactggggcgtgattacatggctgccgggttatacgaccgcgcggaagacatgttcaatcagctgaccgatgaaactgacttccgcattggcgcgctgcaacaactgctacaaatttaccaggctaccagcgagtggcagaaagcaattgatgttgccgaacgcctggtgaagctgggtaaagataaacagcgcgtcgaaattgcccatttctactgtgagttagctctgcagcatatggccagcgacgatctcgatcgtgccatgactttgctaaaaaaaggtgcggcggcagataaaaacagcgcccgcgtatccatcatgatgggacgcgtgtttatggcgaaaggagaatacgccaaagccgtcgaaagtttgcaacgtgtcatatcccaggacagagaactggtcagcgaaacgctggaaatgctgcaaacatgctatcagcagttgggtaaaactgccgaatgggcagaattcctgcagcgcgcggtggaagagaacaccggtgccgatgctgaattgatgcttgcggatatcatcgaagcgcgcgacggtagtgaggccgcacaggtctatattactcgccagcttcagcgtcatccgaccatgcgtgtgttccataagttaatggattaccacttaaatgaagcagaagaagggcgtgccaaagagagtctgatggtgctgcgtgacatggttggcgagaaggtacgtagtaagccccgttatcgctgccagaaatgtggttttaccgcatacaccctctactggcattgtccgtcttgtcgggcctggtcaaccattaaaccaattcgcggtcttgatggcctgtaattttaaaaaaatccgactttagttacaacatactaattattgatgttctattgtgctccggcaccgacggcgcggaaaagcctgccagaggagaaatcgcaactgttaattttttatttccacgggtagaatgctcgccgtttacctgtttcgcgccacttccggtgcccatcatcaagaaggtctggtcatgacgttaactgcttcatcttcttcccgcgctgttacgaattctcctgtagttgttgcccttgattatcataatcgcgatgccgcgatggcctttgtcgacaagatcgacccacgcgattgtcgtctgaaggtcggcaaagagatgtttacattgtttgggccacagtttgtgagcgaacttcaacagcgtggttttgatatctttcttgacctgaaattccacgatattcccaacactgcagcacacgctgtcgctgctgcggctgacttaggcgtgtggatggtgaatgttcatgcctccggtggggcgcgtatgatggccgcagcgcgtgaggcactggttccgtttggcaaagatgcaccgcttttgattgctgtgacagtgttgaccagcatggaagccagcgacctggccgatcttggcgtgacactgtcacctgcagattatgcagaacgtctggcggcactgacgcaaaaatgtggccttgatggtgtggtgtgttctgctcaggaagctgtgcgctttaaacaggtattcggtcaggagttcaaactggttacgccgggcattcgtccgcaggggagtgatgctggtgaccagcgccgcattatgacgccagaacaggcgttgtcggctggtgttgattatatggtgattggtcgcccggtaacgcaatcggtagatccagcgcagacgctgaaagcgatcaacgcctctttacagcggagtgcatgatgagtgattccaacagtcgtctggtctactcaacggaaaccggacgtattgatgagccaaaagcggcccctgtacgccctaaaggcgacggtgtggtgcgtattcagcgtcagaccagtggacgcaaaggtaagggcgtttgcctgattaccggtgtcgatctcgatgatgccgaactgacgaaactggcagctgaactgaagaaaaaatgcggctgcggcggagcagttaaagatggaattattgaaattcagggcgataagcgtgatttattaaaatcaatgcttgaagcgaaagggatgaaggtaaaactcgcaggcggctaacataaaaagccacggatatatccgtggctttcgaatattttactgtgtgtattattcagttatttcgtactgaacagaatcaagcgtattataattgcgagtcgataatcgacatttatttacgattatttaccgacctggtgaccaataacaccaccgacggctgcaccacctaatgtacccaacgtactgccatcggtcagtactgcaccgcctaatgcccctgcacctgcaccgattgcggtgttgcggtcccgtttagaccagttagaacaggcactcagagacattgccagggtaattgccagaacagccgcggtcatttttttgctcgttacaaacataatactctctcctgaatttatgattcacggaagtaagctctctataactataatagctaagaataagccaggtgaaattattccgtgaaatccgctcgcgcgcagggttatatcacgcaggtgataatgacttcctgttatatcgctgataataattttatatcttgagagtgttaataacaggtaaatagtcttaattatcaaccaggaatcatcttagagcggatgatttgccaaactgcaaatcatccgtagagaagggaaatggttaaatgtcaacgacgtgaacggtgagtttactgtgctcaagatgcatcagatcgctggcgcgtattttcgaatcggtaatcacgcgattgaatcgctcaacggggccgatggagtatgaatgtacagcaccaaatttcgagctgtcggtcaggactatcgcctcgcactctttttccagcacggcattgaccacatcggtacgcatcatatcgcgaccggtaaacccagtttcaggttgccagccatcaataccaataaatgctttgctgaaatgcacctgttggatgcactggcgtgtcaaagggccaaccatactttcgctttttttctggtacacgccaccgagcaaaatgacttcacaaggcgcgtctttcagcaaatgcgcgatgtagctgctgaccgtgatgatagtggcatttttcttctgctcgcccagagtcctggcgagcagggcattgctgctaccattttcgataaagatggtttcgcccggttgaaccagtgacgcggcaaactcggcgagttcacgcttcagcgtatagttgctcatcatacgggtttcgacgtcatcactatcaagcgaaactgcaaaaccatgtgcacgtcggaggtaactcagtttttcgagggtgttgagatcctggcgaatggtaacttcagaaactccagtggcttttgccagatcggttacgctaacctgaccctggtcaatgaccatctgtagaatagtttgttgtcgggaattcatcgctgtaattcttataacgttataatactaaataaaaaatactgacgcgccgggcatcctcaaataggaaaacctgaaggcacgattgttagatctcccacggtgccttcgggatgtctggcgtagattcagcaacctggcgcaagagttctgctttaagtatctcgagattatggatcgcagagtggtaatcgcctgccacaaggatatctaacacaatatcaatacgttcggcaacgcgctgggcatcaaattcagacatcaaggacatccttatagcaaaaggggaaaaatgaataatgcaaaaattgccgctaaaagagaagtgtttaacagcaacggctaattatcatccgggaatacgatatataatgacggaatatagcgctaagtatatatattcatctacttatgcgcgcttcagatagcgtttataccagcgttcgaaggcaacggcgggcatcggtttggcaaacaaaaatccttgtcgctcattgatcccgttcttggttaaaaaagcatcttcctttgcactttctacaccttcggcgatcacctgaagattcaatgcctgggccacagcgacgatcgcccggaccagtgattgcgagacaggctgtttgtgaatatcccgaacaaaaacctggtcaagtttgatggcatcgatcggaaagcgcgccagttgcgaaagtgaagagtagccggtaccaaaatcgtccagatgaacttgcgcacctaatcggctaaattgttgaataacagacagtgccagttcatcattctcaatcaggcagctctccgtcagttcaacatctatagggcagtattcaaaattgagttcctggagaacctgtttcagggcggtgaaaatggtttgatcggcgagctgacgtgcagaaatatttaccgccactcgcaggttaatgcctttatcccgccacttcgctacctggcgtacgacatcgagaatcacccaacggcctaaaggcacaattagccctgattcttcggcgtaggaaatgaagtccaacggtggaatcaacccacgttcaggtgactgccaacgtactagtgcttccagactgcgcacttcgccacgccaggtgattttcggttgatagtgaataaccaactgatcgttttccagtgctttacgcaagttggtatccagccagagatattcaaatacccgctgattcatttctggggtaaaaacgcaaaattgtcctcgtccgccttccttcgctgtgtacattgctgtgtcggcgtgacgaataatagccgcgctgtccgaaccatgttcgggagagagtgaaatacctactgaacagctggtataaacttcaattaaaccaatgcgaaaggggagtcgtaagcgggtcaaaattcgtgatgccaatgcttccagcgcgctttgtgaggtattggatgccagtaccagaaactcatcgccacctggacgcgccaatacttggtcatgttcgagacagcttaaaatagccaatgacacgtcgcgtaataactggtcaccaaacaaatgcccataggcgtcgttgacctttttaaaattatccaaatcaagatacacaaccccaactttattgttatctgcctgattaatagcgtgatcgattaactcctgcatcgcgttacgattcggcagtccggtgatactgtcggtatttgccagaatacgcagtcgctcctgagcgcggcgctcttcggtaatgtcggtgccggaacagattaaaaaaatctcgtttttgccactgccgctgtggacaaatttattgcgaaacagaaacagccgctggcctttacgtgttggtatccatagttcgacttcatatgcattgccgcttcgaaaaaatacacggttattgcgcctggatgccgcagcttcacgacgactcataaacagtttaaacacgctttgcccaatgacgtcgtgttctttcaaccctgtgtaatcttcacataaccgattgaagcgctggatattcccccggctgtcgagaatcactattgcggaatgtgcttcagaaactacctgctcagcaaaggaaagcccatgtgataaatcacgagcaaccgccggtgtgtcatgccatgcagacgcgttgcctccccattctcgtttattgatttttcgtcctaccagatgcacagaaagatcgctttcatcgacggtcagactcatcatcaggctggaggtgatgaccgtcatttccctgatgcgagcagcctgttcggcagatagttgcaaaatacgatcgggttctgtgatttcggtggtagaaaagcgcaaaacatcgctgctttccgtcaaccgccagtatggattgtgcgatccgagaaagttgtacaacgttgtggactccctaacggttttcatgatgcatatcctccggttaacagcggagtccgcagttaaataaaaggaacaacatgacttacatgaaattaacggcggctaaacacattgtttttttatatatttatttgtaatccagttttggaaaaacgccagttttcaaacgaaagtcagttaaaaatctgccgggatatgacgaaggttgagcggggaaataaacggcccatccatgaggaatgggccgtgaaaggagattacgcgactgggcgcgcaataatgctgcgggtttccatgcggacttcggcaatggtgacgtcaataacgtcagtcactttgtaagccgtttcacctttaatttgtacagtgccgttttcctggctgcaaaccagttcatcgcgcacagcgtgtaagaaaggtgctggaataaaggcgatagcgccgttatcaaccaaacgaacacgcatgccgccacggctgatatcgacaatttccgccgcgaaacgggtgtcggtcccggctttgtctttcaggaagcgtgcgtataaccagtcgccaacatcacgttctgccatccggttgagacggcgacgctcggccatttggacagtgatttcatcctgtggacgcgtcgcagtttcgcctttgataaccgctttcagcagacggtggttgatcatgtcgccatatttacggatcggcgaagtccaggtggcgtatgcttccagaccgaggccaaagtgaggaccgggttcagtgctaatttcagcaaatgactggaagcgacgaatgcggctgtcgaggaaaccagttggttgcgcatccagttcacgacgcagtttgcagaaaccgtccagcgtgagcacttcttcagcatcgacatgcagaccgtgcgttttcagcaacgctgccaacgcgtcggcattcgccggatcaaagcccatatgcacgttatagatgccaaaaccgagcttatcgcgcagtacgcgggccgcacaaatgttagcggcaatcatcgcttcttcgacgatacggttggcaatgcgacgaggctcggcgacgatatccagcacttcacctttttcaccgagaataaagcggtaatccgggcgatctttaaacaccagtgcgtggttatgacgccactcgccgcggcgttggcaaatttgtgctagcaaacggacttgttcggcaattgcttcgctttcaggctgccagtcaccggtattttccagccagtcagaaacctggtcatacaccagcttcgctttggattcgatggtggcggcaaagaattcgatattatcttcaatggtgccatcagtggagagcgtcatgcggcatgccagtaccgggcggacttcattggcgcgcagtgagcagagatcgtcagaaagctcgcgaggcagcatagggatgttgaagccaggcagatagttggtgaatgcgcgaattttcgcggctttgtccagcttgctgccttcagcaatccacgcggttggatcggcaatcgccacaatcagctgaagtttgccatccggtaacgccttggcgaaaagggcgtcatccatatcttctgtgctggcactgtcgatggtgacaaaatccagcgcagtcagatcttcacgaaccagaccttcatcgagcatttcggtagcgacgccgtctggtgcttctttttccagattatgacgcgcaagggtaacccaccacggtacaaagtgatcgtcaccaaaagtgatgtattgtgtcagttcagcatagaaagaacgatcgcctttcagcggatgacggcgcatttcggcaaccgcccagtcgccttctttaaactcgtggttcaggccacgggctgcgcggcaaggaatggcgtcttttaagagtggatgatcaggaacgatggccagacggtcatttttgccctgaactttacccacgaaacgagtcaggaacggttcaaccagttcttctggctccgcggattcacgttctttttcactgtggatcaccgcgataattcggtcgccatgcatgacttttttcatctgcggcggcggaatgaaataacttttttgcgcgtcgacttccaggaagccaaagcctttttctgtggcttttaccaccccttcagcgcgtggcgtctgggaatgcagttgctgtttaagctgcgctagcagcgggttgtcctgaaacataattgtctattttggtggccattagagcggctgacagttttacgcgaatctgtctgacgcggcaaggttaatatgtctcacccaacgcgatttttaagcgatttatccagccacacagcccgctccataccagcagattaataatctgcgttgatgatttttcgtgttcgagtaatgggctgaactgggcggcgctaaagcgatcgggtgctcgggtcagccattgtatcgcctgaacggtagcgcgctcaacagaatgacggtcagcccatcggttaatttcattttcgcccttgcgcagaaaggggctgatttttttatattcatttgatgaattcatacaggcggcaaaacaagcaggactgccatttatccgcgcgcataacaacgccgcaagctgattatccggctgtgtattgacccgtgtgctgtttaacaacttttcgagaagggaaagtgaaatagggtggagagagagtgtttcggccagttggcaaagttctgcagttgaactttttgtgtgctcttcagggagtttttccacctcatagctgcttcgccagcgtaatgattcatcagcaaacagtgacgcgtcggcgtagttttgtatctccagcccgggtaaccagcgtaccggatacccgagataagcctgaaatgtcgcaattgtccgcgcctgaaagccaataaaaccaatgatttggttaatgatcacacagtcacagacagtaagaccaacgtcattcagatgctggcgcgatcggttgtcgataatagaaggcgagctagccagttggcgggcatattgcgtgatttgtgccaaccgatgattactttccctggaggaatcaggcccggggagcggcgtaagtcgcgccgaatagtagttacataaccgttggacgccgcaaacctgagcaaccgtcagggccgtcgacaagcgttcataagcggtgaaggtctgtgaacgggtcacggtaagcgggtcagggaacaactctactgcaagaacgcgcgcagggaccagccatgaaaggaagggtgccagcgtttcttcatcaaggatcacgtcgagcagaaagggatcgctgacctttgcggcttccgggaccagaggcagaacgtcatactccgcagtactggattgcgtttcatgataccagtggcttttgccggtgatgtggcgttgttccatgggcgctccttggtcgtaaaggaaatcgttatcctgacgcaaggcgggaaggggagaaagacggatcggcgataacaaatatcagaaaggtataacagagataacgggcggcagaacgccgcccaatatttaccaacagaacgattatttcagttcgagttcgttcattgcagcgatgctgaaaccgccgtcaacgtggaccacttcaccggagataccggcagagagatcggagcacaggaatgccgcggagttacccacatcttcaatagtaacggtacggcgaatcggggtaacggcttcgcaatgagccagcattttgcggaagtctttgataccggaagccgccagagtacggatcggaccagcagagatggcgttaacacgcacaccttccggacccatcgcgttcgccatatagcgcacgttcgcttccagagacgcttttgccagacccataacgttgtaattcgggatagcgcgctcagcgccaaggtaggaaagggtcagcagggcagaacccggattcagcatggagcggcaagcttttgccattgcaacgaagctgtaggagctgatgtcgtgggcaattttgaagccttcacgagtaacggcgttaacatagtcaccatccagctgatcgccaggtgcaaaaccaatagagtgtacgaaaccgtcaaatttcggccaaactttccccagttcagcgaacatggtgtcgatgctggtatcttcggcaacatcgcactgcagaacgatgtcagaacccaattgagcggcaaattcttctacgcggcctttcagtttgtcgttctggtaggtgaatgccagttcagctccttcgcggtgcatcgcctgagcgataccgtaggcgatggacagtttgctggcaacaccggttaccagaatgcgcttaccggaaagaaaacccatagctttaatccttattgttgatgcttgttgtgcctgaaaatcaggcgattcgtcgttttagtaaacagtacgaacagataaacggttattataatcaacctggctgtgggtggctatagttgcgctttctgtagcggagagaagctgcggtacagagcattttgcgttatctactcctgacgcctgcaagggggaggttggggaaatatcttatagaatctgactatgaaactattcgtattagctccgataaatttgatgatgaaaacagaactggcgacaacaagtcgctgtctttctgatgaattgaccccaacttaatattgtcaactatcttcacagaatctccacaatctcttcattatcagaatatgcatcatgaataagataaaaatactttccattactttggagaaacgtataattagcaaaaatgagaacgatcattctcatcaagtgataggccaggagacagaaatgaccagcaagctggagatacgccacaaacagcgccaggatgaaatcattaacgccgcccgtcggtgttttcgtcgctgcggatttcatgccgccagtatgtcgcaaattgccagcgaagctcagcttagcgtgggtcagatatatcgttacttcgccaacaaagacgccattattgaagagatggttcgtcgtatcatcgactttcgtattgcccaaatggacattgacgcgcgtaccgatcacttcccggaagtccttgccttgcgtaaatccttaaatgaggacgacgacgcgctgatgctggaagtggctgcagaagccacacgcaacccgcgggttatggcaatgcttgaagaagctgacgccagaatgttcgctaacggttgtgcacatatgaaaagaatgcatccccatcttagcgacgagcacattcgttgctgcgttgaagtgtttgctaccatgatggaaggtacggtttatcgtcgtttaacaccgcaaaaaagcgatccacaacatctgcaggaaatatatcaggatattgttagtatgttgataaataaataagaacagaattaaccaatagcgggggatattaatcccccttatttcattgcgaaattcatttcgcgatgcgggttcgttataactgaatatccctgacatatcctcattaatttcaatgaggagggtatttctcaccctggagaaaataatgaagtatatagcaacatctgtagtggcaatgctgctcttatcgggttgtgataatacgcaaagtaacaattcatccccgtcagaaacagaagtcggcgttgttacgctcaaatctcaaccggtttcggtagtcagtgaattaaccggacgtaccagtgctgcgctcagtgctgaagtacgtccgcaggttgggggaattatccagaaacgcttatttaaggaaggtgatctggtcaaggctggacagcctctctaccagattgatgcggccagttatcaggctgcatggaatgaagcccgggcagcattacaacaagcacaggcactggtaaaagccgattgccagaaagcgcagcgttatacccgactggtgaaagagaacggtgtttcacaacaggatgctgatgatgctcagtctacctgtgcacaagataaagccagtgtagaggcgaaaaaagccgcactggaaactgcgcgcattaatcttgactggaccacggtaaccgcaccgatttcggggcgtattggcatttcgtcggtaacccctggcgcactggtgaccgcgtcgcaggatacagcgttaacgactattcgtggtctggatacaatgtatgtcgacctcactcgctccagtgtcgatttattacgtctgcgtaaacagtcactggcgaccaacagtgacaccatgagcgtctcacttattctggaagatggcacaacctacagcgaaaaagggcgtctggaactcaccgaagtcgcggtggatgagtctaccggttcggtgacattacgggcaattttccccaatccacaacagcagttattaccgggaatgtttgttcgcgctcgtgtcgatgaaggcgtgatggaagacgctattctcgcgcctcaacagggcgttacgcgcgatgctaaaggcaatgcaactgcgctggtggtgaataaagacaataaagtagagcagcgaacgctcgaaacgggagaaacgtatggtgataaatggctggtgctgaacggcctgcacaacggcgaccgactgattgttgaaggttctgccaaagtcacttcagggcagaccgtcaaggctgttgaagttcaggctaatggaggcaacgcctgatgttttcgcgcttttttgttcgccgcccggtctttgcctgggttatcgccattttgattatgttggcggggattctggctattcgcacattgcccgtcgcgcaatatcctgacgttgcaccgccgaccattaaaatttcagccacttatactggtgcttctgccgaaacgctggagaacagcgtgactcaggttatcgagcaacaactcactgggcttgataatttactctatttcagctcaaccagtagctctgatggttcggtcagtattaatgtgacctttgaacaaggtaccgatccagatactgcacaggttcaggtgcagaataaaattcagcaggcggagtcgcgcctacccagcgaagtgcagcaaacgggtgttacggtggagaaatcacaaagcaactttttgctgattgctgccgtgtatgacaccactgacaaagcctccagttcggatatcgccgactggctggtcagtaacgttcaggaccccctggcgcgtgttgaaggtgtggggagtctgcaagtctttggcgcggaatacgccatgcgcatctggctcgacccggccaaactggcgtcttactcgctgatgccttcagacgtgcaaagtgctattgaagcgcaaaacgtgcaggttactgccgggaaaataggggcattgccttcaccgaatactcagcaactgaccgcaacggtacgtgcgcagtctcgcttgcagacggtggatcagttcaaaaatattatcgtgaaaagccagtcagacggcgcagttgttcgtataaaagatgtggctcgcgttgagatgggcagtgaagattataccgctattggcaaacttaacggtcacccgtctgccggggttgctgtaatgctttcgcccggtgcgaatgcgctgaatacggcgacgctggtcaaggataagattgccgaattccagcggaacatgccgcagggatacgacatcgcatacccgaaagacagcactgaatttattaaaatctccgtagaggacgtaattcagacgctgtttgaagccatcgtattggtggtttgcgtgatgtatttattcctgcaaaacctgcgtgccacactgattccggcgttagctgtccccgtcgttttgctgggcacattcggcgttcttgcgttgtttggctattcgattaataccctgacgttgtttgcaatggtgctggcgatcggcttgctggtggacgatgccattgtggtggtagagaacgtcgaacgcattatgcgtgacgaagggttgcccgcgcgtgaagccacggaaaaatcaatgggcgagatttctggcgcactggttgccattgcgctggtgttgtcagccgtattcctgccgatggccttctttgggggatctacgggcgtaatttatcgtcagttctccatcaccatcatctccgcaatgctgctttccgtggtggtggcattgaccttgactcccgccctgtgcggttccgtcctccagcatgttccgccacataaaaaaggctttttcggcgcatttaaccgcttttaccgccgtactgaagataaatatcagcgaggcgtaatttatgtcctgcgccgtgcagcccgaacgatggggctttatgtcgtgctgggtggtggaatggccctgatgatgtggaagctgccgggcagtttcttacccactgaagaccagggcgaaatcatggtgcagtacacgctgccggccggggcgaccgctgcccgtacagcagaagtgaatcgccagattgttgactggttcctgattaacgagaaagcaaataccgatgtcatctttaccgttgatggtttcagttttagcggcagcggacagaacaccgggatggcgtttgtttcgttgaaaaactggtctcaacgtaaaggggcagaaaacaccgcccaggctatcgccctacgggctaccaaagagctgggcacaattcgtgatgccacggtatttgcgatgacgccgccagccgttgatgggctggggcaaagcaatggttttacgtttgaattgttagctaacggtggaaccgatcgtgaaacactgctgcaaatgcgtaatcagttgatagaaaaagcgaatcaaagtccggagttacattctgtacgcgccaatgatttgccacaaatgccgcaattgcaggtagatattgatagtaataaagcggtgtcattagggttgagtttgaatgatgtcaccgacaccctgtccagtgcgtggggcggtacttatgtgaatgactttattgaccgtggtcgtgtgaaaaaagtctacattcagggcgacagcgaatttcgttccgcgccgtcagacttaggtaaatggtttgtgcgcggtagcgataacgccatgacaccattctctgcttttgcgaccacccgctggctgtatggaccggaaagactggtgcgctacaacggctcggcagcctatgaaattcagggcgaaaacgcgactggctttagttccggcgatgcaatgacaaaaatggaggaactggcaaacagtcttcctgcgggaacaacctgggcctggagtggtttgtcattgcaggagaaactggccagcggtcaggcattaagtctgtatgcagtttctattctggtggttttcctctgccttgcagcactgtacgaaagctggtcagtcccgttctcggtcattctggtgatccctctggggcttcttggcgcggcgctggcggcctggatgcgtgatttaaacaacgacgtttacttccaggtagcgctattaactactatcggcttgtcgtcgaaaaacgccattctgattgtggaatttgctgaagcggcggttgcagagggctattccttgagtcgtgcggcattacgcgcggcgcagactcgtttacgcccaatcatcatgacctcgctggcgtttattgcgggggtaatgccgctggcgatagcaaccggcgcaggggcgaacagccgcatcgccattggtacgggcattattggcggcacgctgaccgctacattactggccattttcttcgttcctctgttttttgtactggtgaaacgtttgtttgccggtaaaccgcgccgtcaggagtaagttatgttgcgtcgttctcttatttttctggtgttgttgagtgcgggatgtgtctcgctcgatcctcactacagtacgcctgaatccccaatcccggcgaccttgccgggagcacagggccaggggaaggcaatcagccatgattggcagcaggtgatccacgatccccgattgcagcaggtagtaaccattgcactgaaccgtaaccgcgatgtgcaaaaagcgattgctgatattgactcagcacgggcgctctatgggcaaactaatgcgtcgttatttccgacggtgaatgcggccttaagttcgactcgcagtcgttcgctggcgaatggtacgggaacaactgccgaggctgacggcacggtgtccagttatacgctagatctgtttggtcgtaatcagagtttatctcgggcggcgcgggaaacctggcttgccagtgaatttacagcccagaacactcgtttaacgctgattgctgaaatcagcaccgcctggctgacactggcggccgataacagcaacctggccctggcaaaagaaacgatggccagtgcagaaaactcattgaaaattatccagcgccagcaacaggttggcacggcggcagcgacagatgtcagtgaggcgatgagtgtttatcagcaagcgcgcgccagcgttgccagctatcagacacaagtgatgcaggataaaaatgcgctgaacttactggcaggtacaacgcttgcggaaaatctgctaccgggaacactggaaagcctgccggaacaaatgataagtctggttcctgcgggagtatcatctgatgttctgctgcgtcgcccggatatccaggaagctgaacataatttgaagagcgccaatgcagatattggcgcggcgcgggctaactttttcccgacgatttcgctgactgccagtgccggtgttggcagtgacgcattgtcgtcgttgttcagccacggaatgcagatctggtcatttgcgccatcggtcacattaccgctgttcactggcggaagtaatctggcgcagcttcgttacgcagaagcacaaaagcgtgggctcattgccacctatgaaaaaaacgttcagagcgcatttaaagatgtcgctaacgcactggcgcggcggaccacgcttgaagagcaactggatgcacagcgccagtatgttaaagctgagcaacaaacggtcgatgttggcttgcgtcgctatcaggcgggtgttggtgattacctgaccgtgttgacggcgcagcgcagcttgtggagcgcacagcaggagctgctggcactgcaactgactgattttacaaaccgaatcacgctctggcagtcgctgggcggcggtatgtcatcactcaagtaaggaataatatggctagagtctctctttcatgggcattgattcttggtcttttagccggtatcggcccgatgtgtaccgatctttatttgccggctttgccggagatgtctgagcaactggcggcaaccacgaccataacgcaattaaccctgaccgcatcactgattggtcttggcgtcggacaactgttatttggccctctgagcgacaaaatagggcgtaaacgtccgttaatcttgtcgttgctattgtttattgtttcttccattttatgcgcgacaacgaacaatatttactggctggtggtctggcgttttattcaagggatcgcgggggcgggtggttcggtgctctctcgttctattgctcgtgacaaatatcagggagtaacgttgacccagttttttgcgctgttaatgacggtgaatggcctggcaccggtgttgtcgccagtgctgggcgggtacattgttagcacttttgactggcgcactttattctgggtaatggctgaaattagcaccgtactgttgctgggctgcctgttatttattaatgagaccttgccagaaaataaaaggggctcatcattgctattaaccggacgaagcgtggtgcagaaccgccgttttatgcgcttttgcctgattcaaagctttatgctggctggtttgtttgcatatatcggctcttcgtcgttcgtgttgcagaaggaatttggctttagtccaatgcaatttagcctggtgtttggccttaacggcatcggacttatcattgcttcatggatcttctcgcgcctggcgcgacggattaacgcgatgacattgttgcgaggtggcctgatagcggcaattttgtgtgcattgctcacggtcttatgcgcatggatacaattgcccattccggcactggtggcattatttttcaccatcgcattttgtagcggcatcggcactgttggcggggcagaggctatgagtgcagtagggacgcaggaatctggaacggcgtctgcgttgatggggatgagcatgtttgtcttcggcggtatagccgcgccattgtcgggaattggcggagaaacactgttaaaaatgagtctggcaattacggtgtgttatacgctggcattgctggttgctctcaccagaatcgacaatcaaaagtaatgaacacctcatcctgaggggggcctgtcaggatgaggtgcaaaacactaacggtccttacgccacgcatccgccgtcaatgcttcgccaaaatgaccggcgatcagccgtttggtgagttcatgcagcggcgatgccagcacatctgcggtgctgcctcgctcgacaacctcgccctgatgcatcaccagcacctggtcgctaatgtgcttcatcattccgatatgctgggtaacataaatatacgaaatgccctgtttttcctgtaactccagcatcagattaatcaactgcgaacgcatcgacatatccagtgaggcgagggcttcatcggcaataatgacttttgggcgcaatatcagcgcgcgcgccagacccagacgctgtttttgcccgggtgctaacatatgcggatagtaactgacgtgatccggtagcagcccaaccatacgcatcgtttcaataatctgtttgcgacgctgttccggttccaggtcggtgttcaggcgcagtggaaaatccagaatttgcgagatacgttgacggggattcaacgaggtggaaggatcctgaaaaatcatgcgaatacgctgactgcggaaggaataatcgccaaaatgcagcggatgatcgtcaatcaataactcgccgctggtaggttctatcattcccgccagcatttttgccagcgtggatttacccgaaccattctcgccgataatcgccagtgtctggccttcacgtagcgtaaagctcaagggttttaccgcttctacggtctgacgacgaaaccagccggtccggtagcggaacgttttacttaaattgcgcacttcaagtagcgtttcgatcatctcactctttctccatgttcagcgggaaatgacaggcatagagatgatttttcgcccccgtcaaacgtggcgtcacaatgcattctcgttgtgcatacgggcaacgtggccccagacgacaaccaatcggtaactgttccagcagcgggatagcgccgggcagcgtattgaggcgacttttatgcggcatcgcgctgccgaagtctggtatcgcgcggatcagcgcctgggtataaggatggtgtggcatcgtcaccaactccttactcggcgcggtttccaccgtttgaccgcagtaaagcacgttaattttatccgcccattggctaagcatttgtaagtcatggctgataagcaaaatagtggtattgctgttttggttgagacgcgtcagcaggcgaaagatttgcgcctgggttgttggctccattgagttggtcggttcgtcagcaattagcagacgtggttgattcgccagtgcaatggctatcatcactttctgacattcaccttcggtcaactcatagggaaaactgcgcatcgcatctttgtgatctttaatccccacgcggtgcagcagttcaatggcacggcgtttgcgccagccaaaacgctgccaccaacggcctttataggtccaggcagggatgttttgcatcaactggcgacccacacgttctgaagggtcaagacacgactgcggttcctggaaaatcatcgacacgttgtgaccaaccagcttgcgccgttcgcgtgcggagagacgcagcaaatcgatatcatcaaaacgcatacggtcagcagtaacacgccagttatctttattcaccccacaaatcgctttcgcaatcaaacttttgccggaacctgattcgccaacaagaccgcggatttcaccttcggttaaggtcatacttacgcggtcgacggctttaacccactcatcaccggttttaaattcaatggtcaggttacgaatatcgagtaatggcattattccacccccgcaataattgcacgacggacaccgtcgccaaggaggttaaccaacagcacgctaatcataattgccgcacctggcagcatgacagtccatggggcgacataaatcagttccagcgcatcaccgagcatcgcgccccattcaggcgagggcagttgtgcgccgaggtcaaggaagcccagcgcggcgatatcgagaattgccatcgacaatgcgcgagtgatctcggtgaccagtccggcggtgatgttgggcatcacagcaaaccagagaatattcagcgttgatgcgccatccagacgggcggcgataacgtactctttttccagttcgtcatgcaccatgctgtaaatcgaacgtaccatacgcggcagcaatgccagccagacagcaaacatggcgtgagacaaactcggtccggcaaacgctacaacgataattgccagcagcagcgaagggatcgccagtaaggtatccagaatatggttaagcaccgctgagcgtaggccgtgggtcgccccggcgaaggtgcccagtaccaggccacagatcgtcgcggcgagcgtcaccacaaatgcgccacctacggttggcgcagctccgctcagtaaacggcttaaaacatcgcgtccgaggtcgtcagtccccaggaagaaagaaacttcgccatagcgcgaccatgacggcggcaataattgataaccgagaaattgctggtcgatgccgtaaggcgcaaaccagccgccaaaaatacacagtacagccagccccgcgcagccgtacaggccgaccatcgcagaggcgtcactataaaatttgcgccaggcggtacgcagcgtgcccggcgggcgcttttcgctgtatacgctatcgtaaggcataccattccttatgtttcagagggttagccatggcacccaaaatatcagaaatcacgttaacaataatgaccagtgagccacacaccatcactccggcggaaatggctgcgtaatcctgctggcggatggcgttaattaaccagcgccctaaacccggccagctaaaaaccatttcggtgatcatcgccagcgtcagcatggtggaaaactgtaagcccaggcgaggaataaccggaggtaacgcgttatgcagaacgtggcgacgcaaaatagtaaagcgcgacaaaccgcgggttgccgctgctttaacatagttctggtcatacacttcgatagtgctgatacgcatcagtcggatcacttcagttgttggcgcaaccgacagggtgatcacgggcaatatcatatggcggattgcgctcatgaccatttcatcccgccacggtgagttcgaaagccaggcatcaatcaacgcaaaaccggtaatcggtttcacttcgtagagcaaatcgaaacgcccagaaacgggcaaccaacctagcgtgagtgaacaaaacagcgtcagcagaagcgccagccagaacaccgggattgaaaagcccagtaaggcgatggcgttgatcaagttatcctgccacttatggcgcgtaatcccggcaatcattcctacggggatgccaacaatcagcgcaaaaccgaaggcgaggatgcacagttccatcgtcgccgggaagacctcttttaactgttcggcaatcggttgaccgttaatgctggaaacaccaaaatcccagtggatcaggccgttaaaccagaacacccaggcattccacagtgacgcgccttgtaacggcgcatgtggggtgaaatagctcaagctgaagccaacgaaggtcagcaggaacaaggtcacaatcaataacaaaatacggcgtaaggtgaagataatcatggctttttcacctcatcctgtttctcgcgatacaccccagcaaaggaggcgttaccaaacgggctaagtaccagacctttgatatcgtaccgataggcctgcaaacgcaatgacgacgccagcggcagaataggtaattcctgcgccagaatactttgcgcttcgtcataggcttcaatacgcgccgccagctgctgcgaagagagcgccttacgcaatacgctgtcgaatttcggatcgcaccagtgggcgaggttggtctgcgaatgaattgctgcgcagctcagtaacggacggaagaaactgtccgggtcgttactgtccgtcgcccaaccggataacgtcagatcatggctcatatccatcaaccgcgcctcctgaaaacgaccttctaccggcacaatcaccacttttacgccaacctgtgccatatccgcctgaatcagttcggcggttttcagtggactggggttccacgcctgcgaacgtgtgggcacccacagtttcagcgttaagttttccagccccaacgccttcaactgttcgcgcgattttgccggattgtattcagtaattttagcctcgttgtcataggcccacgaggctcgcggtaaaatagaggccgccgtttcagccgtaccataatagatggattgcatcaggcgctggttattaatcgccagtgccagcgcatggcggaccgccggattatttagcggcggtttggcggtgttgaatgccagataggcgacattcatcccaggacgcagcgttaaacgcaagcgtgggtcgtcacgcaaaatggatagctgactggcagcaggccaggccagaacgtcgcactccccggtcaggagtttcgacaatcgtcctgtaccgccagagcctaaatccaccaccacttgtggcatcaacggcttaccacgccagaaatcatcatgacgttgtaagcgaatatattgcccggcgcggtattccgacaactgatacggaccggtgccgaccggttgacggtcgagttgctcctggcgatcttctttctctaacttccctgcatattctgccgacatgaccgaagcataatgggtcgccaggtgccacaaaaaagaagcatccggctgggcgagacggaactcaacggtatgattatccagcttgcggacgcttttcacgttatcggcaaattgcagactgtcgaaataggggaagttactgccgttgacgttatgccacgggttgttgcggtcaaaaatccgttggaaggtaaacaccacatcatcggcattcattttacgagtgggagtaaaccagtcggttttttgaaacggaacatcgcgacgcaggtggaagcgataggtcgcgccgttgtcgagtacttcccagctttcggcaagttccggcatcaggcgataggtatagggatcgacatccagcagtcgatcataaaactgggcggcaagggtatcgacaattaacccactgctcgctttggatgggttaaaggtgttgacttgcccgctgacgcaatagacaaaaccgctgtcgcggatatcagcatgcgggggggattcaggcgcggcgattgcctgaccactcacaagtccagcaatcaccaaaagagacgataatacctggcgcataatattaagggattttatgtaaagaggctatcttactaatatttaatgacatttgccattaccgtttgtgttcagaggtcgtaatgagggccgtgtggttggtcattgaacaggtggcgtcgccatcagttcaacattcgtacccgtgatttctttataactataactcacagaacaacttagcgaggagcatagcggtacgatcgtgagaaacccattaaagcatgctgcagtgcgtgtcatttttagccggatgcggcgcgaacgctttatccgggcaacgatactgaccgatagtctgcaattaaataattactcattaccccattgattcaaaaactctgcgatctcatcaatgcgtacgggattaatccccgcttcagcagccatttcatgttgggcttcttcactgatctcttcattattcatcaaacgggtgagcagtaactggaagtagtgggccagcggtgtgcgttcagcgtctgcgacaggctctgcgcattcggtcgcgtactcatcggcaatatcaaaatattttagcgggatatcgtggttcattatttgcccctggggttaatgcgctaagcataaaggcggatgatagcactcgtgatccgggtcatacatatttttatagttaatggcgcggtgcattaccctcaggcaggataatgcgccgcgcattcgactattacgtttcgctcaccggcgttctgtcgccatcatacaacggcactttgcgatagcggcggatcaaataccacaaatatgcgccgcctaacgaagcccataccatcccggttgcgcaattcgatgcggcaatgaaaattttgcaggatgcgctgagagattaatacgcagaagcagggttaacgcaataatgcctgatgcgcagcgcttatcaggcctgcaaacgacgtattgattatgtatgccggataaagcgttcacgctgcatccggcaagttgtattgcccaacttcgctaaatctggtgctttttcaacaacgcgcggaactgatgataggttaaccccagcaattcagcggcgcgcttctggttatatttcccctgttgcaaactgagttgcagcaactctttttcctgctgcatctgaaactcgcgtaaatccagtggcagcgtcggaagcgaggtgttttctgaaacggcgatggcttcttcagatggacggcgtttaaagggatcaataatgatgtcatcaagcggataatcgctggtgccgtgacgatacactgaacgttccaccacgtttttcaattcacgtatatttcccggccagcgataattcagcaatgtttctctggcgtgctctgtaaaacccgggaacagaggcagcttgatttcccgacacatctggatggcaaagtgttctgccatcaacataatgtcgctttcacgctcgcgcagtggtggcagttgcactacatcgaaagccagccggtcgagcaggtcagctcgaaaagtaccttcattgaccatcgccgggagatcggcattcgtcgcgcataccaaccgcacattcacctgcaatggctggctgccgccgacgcgctccagttcaccgtactcaatcacacgcaataatttttcctgcaccatcatcggtgccgtagcgagttcatcaaaaaatagcgtaccgccgtcggcacgttcaaatctccctggatgacgtttttgcgcaccggtaaacgcccccgcttcgtgaccaaacagttcggaatccaacagattttcatttaacgccgcgcagttaagggaaataaacggcccttgccaacgggaggagagataatgcaggcggctggcgatcagctctttaccggtgccgcgctcgccgatgatgagcaccggtttgtccagcggtgcgagatgcgaaacctgttccagcacttcgagaaagctgttcgcctcaccgagtaaattatctttgtattctgccatgatgaaattcgccacttgttagtgtaattcgctaattcatcctggcatgttgctgttgattcttcaatcagatctttataaatcaaaaagataaaaattggcacgcaaattgtattaacagttcagcaggacaatcctgaacgcagaaatcaagaggacaacattatgggtattttttctcgctttgccgacatcgtgaatgccaacatcaacgctctgttagagaaagcggaagatccacagaaactggtgcgtctgatgatccaggagatggaagatacattggttgaagtacgttctacttcggcgcgtgcgctggcagaaaagaaacagctgactcgtcgtattgaacaagcgtcggcgcgtgaaattgaatggcaggaaaaagcggaactggcactgctgaaagatagagaggatctggcgcgtgcggcgttaattgaaaaacagaaactgaccgatctgattaagagcctggaacatgaagtgacgctggtggacgatacgctagtgcgtatgaagaaagagatcggcgagctggaaaacaaattgagcgaaacacgcgctcgccagcaggcattgatgttacgccatcaggcggcaaactcgtcgcgcgatgtgcgtcgtcagctggacagtggcaaactggatgaagcaatggctcgtttcgaatctttcgaacgccgtatcgaccagatggaagcggaagcagaaagccacagcttcggtaaacaaaaatcgctggacgatcagtttgccgaactgaaagccgatgatgcaatcagcgagcaactggcacaattaaaagccaaaatgaagcaagacaatcaataataacatccaggcggcgtccgaacgcgccgccgctcatcgtctaaggagtacttatgagcgcgctatttctggctattccgttaaccatttttgtgctgtttgttttaccgatctggttatggctgcattacagcaatcgttctggtcgcagtgaattgtcgcaaagtgagcagcagcgattagcgcaactggctgatgaagcaaaacggatgcgcgaacgtattcaggcgctggaatccattcttgatgcagaacatccgaactggagggatcgctaatggcgggcattaatctcaataaaaaattatggcgtattccacagcagggcatggtccgtggcgtctgcgccgggattgccaactattttgatgtaccagtaaaactggtgcgtatcctggtggtgctgtcgattttcttcggtctggcgctgtttaccctggttgcttacatcattttgtcatttgcgcttgatccaatgccggacaacatggcctttggtgagcagctaccttccagcagtgaattgctggatgaagtcgaccgtgaactggcggcaagtgaaacgcgtttacgcgagatggaacgttatgtcacttccgatactttcacgttacgtagccgtttccgtcaactgtgaggaaagttatgaatactcgctggcaacaggccgggcaaaaggtgaagcctggtttcaaattagcaggcaagctggtacttcttaccgcgctgcgctatggcccggcgggtgtagctggctgggcgataaaatcagttgctcgccgaccactgaaaatgttgctggctgtggcgctggaaccgctgttaagtcgggctgccaataaactggcgcggcgttataaaaggtgaggggaatttcgcaaaaattgttaaagctaaggcgtattatggatggcaattttcatccatagaaggacgcttacatgtttaaaaaaggcttacttgctctgacactggtgttttcactgcccgttttcgccgctgaacactggatcgatgttcgtgttccagagcagtatcagcaagagcacgttcagggagccatcaatattcccctgaaggaagtgaaagagcgcattgccaccgccgttccggataaaaacgacaccgtgaaagtgtattgcaatgccggacgccagtcagggcaggcaaaagacatccttagcgagatgggatatacccacgttgagaacgccggcggcctgaaagacatcgcaatgccgaaggtcaaaggttaaaagaatccaccctaagcggcgcttatgcgccgtttactttttctgtcacaccttatttacatccccatagattatttgcgtcagctcacaaatacgctttttcccaggtaaaaaaagatttcctgcgtgactaaaccccttgagctcaattgacagtttattttatgcggagtagtctctcgtttcatgggaccgctaccacggaaaggcaacatgaaacagaaaattacggattacctggacgaaatctacggtggaacatttaccgcgactcatttacagaaacttgtaacgcgtcttgagagtgcgaaacgattaattacacagcgacgtaaaaaacactgggatgaaagtgatgtcgtgttaattacctatgccgatcaatttcacagtaatgatttaaagccactacccacatttaatcagttttaccctcaatggctgcaaagaattttttcacatgttcatttattacctttttatccatggtcatctgatgatggattttcggtaattgattatcatcaggtcgccagtgaagcgggggagtggcaggatattcagcaactcggtgaatgcagccatttaatgtttgattttgtctgcaaccatatgtcggcaaaaagtgaatggtttaaaaactatttacaacagcagccaggttttgaagatttttttattgccattgatccgaaaaccgatctcagcgccgtcactcgcccgcgtgcgttaccgttattaacgccattccagatgcgcgatcattcaatgcgccatttatggaccacctttagcgacgatcaaattgacctcaattaccgtagccctgaagtgttgctggcgatggtggatgtattgctgtgctacctggaaaagggcgcagagtatgtccgtctggatgccgttggctttatgtggaaagagccgggaacaagctgcatccatctggaaaaaacacatctgattatcaaactgttacggtcgattattgataacgtcgcgccaggcacagtgatcattaccgagaccaatgttccgcataaagacaacattgcttactttggcgaaggcgatgacgaagcgcatatggtgtaccagttctcgatgccgccgctggtgctgcatgcggtgcaaaaacagaacgttgaggcactttgtgcgtgggcgcaaaacctgacactaccttccagcaacaccacctggtttaacttccttgcctctcacgatggcatcgggcttaacccactgcgggggttgttgcccgaaaacgaaatattagcgctggtcgaggtgttacagcaggaaggggcattagtaaactggaaaaataatcccgacggtacgcgtagcccctatgaaatgaatgtcacctatatggatgcgttgagccgccgtgagtgtagcgacgaagaacggtgtgccaggtttattctcgcccatgcgattttgttaagttttcccggtgtgccagcgatatatattcaaagcattctggggtcgcgtaatgattacgcaggtgtcgaaaaacttggatataatcgcgcgattaaccgtaaaaaatactctagtaaagagataacgacagaactgaacaataaagcgacattaaggtattcgatatattataagttgtcgcatttaattacacttcgtcgcagtcataaagagtttcatccggataataatttcaccattgatgcgattaattcatttgtaatgcgaattcaaagaagcaatgcggatggcgattgcctgacgggattgtttaatgtcagtgaaaatattcagcatataaatattactgacctgcacggtcgggatctgattagtgaagttgatatattgggtaatgaaataacactgcatccctggcaggttatgtggattaaataaaaaggaacatttcatgattaaatcaaaaatcgtgctgttatcagcactggtttcctgcgccctgatttcaggctgtaaagaagaaaataaaaataatgtatccatcgaatttatgcattcttcggtggagcaggagcgccaggccgtcatcagcaaattgattgcccgttttgaaaaagaaaacccaggtatcaccgtaaaacaagtgcccgtggaagaagacgcctataacaccaaagtcattaccctttcacgtagcggttcgctgccggaagtgatcgaaaccagccatgactacgccaaagtgatggacaaagagcagcttatcgatcgccaggcggttgccacggtcatcagcaacgtcggtgaaggcgcgttctacgatggcgtactgcggattgtgcgcaccgaagatggcagcgcctggaccggtgttcctgtcagcgcatggattggcgggatctggtatcgcaaagatgtgctggcaaaagctgggctggaggagccaaaaaactggcagcaattgctggacgttgcacagaaactgaatgacccggcgaataaaaaatacggtattgcgctgcctacagcagaaagcgtgttgacggaacagtctttctcccagtttgcgttatccaatcaggctaacgtctttaacgccgaaggcaaaatcacccttgatacaccagagatgatgcaggcgctgacctattaccgcaaccttgctgccaacaccatgccaggttctaacgacatcatggaagtgaaagacgcttttatgaacggcaccgcgccgatggcgatttactccacctatatccttccggctgtgattaaagaaggcgatccgaaaaacgtcggtttcgtggtgccaaccgagaaaaattctgcggtctacggcatgttgacctcgctgaccattaccgccgggcaaaaggccgaagagacggaagcagcagaaaaatttgtcacctttatggagcaggcggacaacattgccgactgggtgatgatgtcgccaggcgcggcgctgccggtgaacaaagcggtggtgactaccgccacctggaaagacaacgacgttattaaggcgctgggagaattgccgaatcagctaatcagcgaactgccaaatattcaggtctttggcgcagtaggggataaaaactttacccgcatgggcgatgtgacggggtctggcgtggtgagttcaatggtgcataacgtcaccgtggggaaagccgatctccctggcacgctgcaagcgagccagaaaaagctggatgaactgatcgaacagcactaaacccaggacaggaatccgcaatgaacaggcttttttcaggtcgttccgatatgccttttgcactgctgcttctcgcgcccagcttattactgctgggcggtctggtggcgtggccgatgctgtcgaatatcgaaatcagttttttacgtctgccgctcaatcccaacatcgagtcaacgtttgttggggtaagcaactacgtgcgtattctctccgatcccggcttctggcactcgctgtggatgacggtctggtataccacactggtggtggcgggcagcaccgtgctcgggctggccgtggcgatgtttttcaaccgcgagttccgcctgcgcaaaaccgcgcgttcgctggtgctcctctcctacgtaacgccgtctatttcgctggtgttcgcctggaaatacatgttcaacaacggttacggcattgtgaactacctcggcgtcgatcttctgcatctctatgagcaggcaccgctgtggttcgataatccgggcagtagctttgtgctggtggtgctgttcgccatctggcgctacttcccctatgcctttatttcgtttctggcgattttgcagaccatcgacaaatcgctgtacgaagcggcagagatggatggcgcgaatgcctggcagcggtttcgcatcgtcacgctgcccgcgattatgccggtcctggcgacggtggtgaccctgcgcactatctggatgttctacatgttcgcggatgtttatctgctgacgaccaaggtcgatattctcggtgtctatctctacaaaaccgcctttgcctttaatgacttagggaaagcggcggcgatctcggtggtgcttttcatcattattttcgctgtcattctgctgaccaggaaacgggtgaacctcaatggcaacaaataaacgcacactcagtcgaatcggtttttactgcgggctggcgctgtttctcatcatcacgctgtttccattttttgtgatgctgatgacctcgttcaagagcgcaaaagaggcgatctcgctgcatcctacgctgctgccacagcagtggacgctggagcattacgtcgacatttttaatccggtgattttcccgtttgtcgactacttccgtaacagcatggtggtgtcggtggtttcatccgtggtggcggtatttctcggcattcttggggcttacgcgctttcccgcctgcgctttaaagggcggatgaccatcaacgccagcttttacacggtgtacatgttctccggcattttgctggtggtgccgctgttcaaaatcatcaccgcgcttggcatttacgacactgagatggcgctgatcatcaccatggtgacgcaaactctgcctaccgccgtgtttatgctgaaaagctacttcgacaccatccccgatgaaatcgaagaagcggcaatgatggatggcctcaatcgtctgcaaattatcttccgtatcaccgtgccgttggcgatgtcggggctgatctccgtgttcgtctactgctttatggtggcgtggaacgactatctctttgcgtcgattttcctctccagcgccagcaatttcactttaccggtaggcctgaacgcgctgttcagtacgccagattacatctggggacggatgatggcggccttgctggtgaccgcattgccggtggtgattatgtacgcgctttctgaacgttttattaagagtggtttgaccgccggtggcgtgaagggataaagcggccagtttctttacaaggagttttacatgaaaaagttagtagccacagcaccgcgcgttgctgcgctggttgagtatgaagatcgggcgatttcagccaatgaagtgaagatccgcgtgcgattcggcgcgccgaaacacgggacggaagtggttgatttccgcgccgccagcccgtttattaatgacgactttaatggcgaatggcagatgttcaccccgcgtccggcagatgcgccgcgcggcattgagtttggcaagttccagcttggcaacatggtggttggcgacattatcgagtgcggcagcgacgttaacgactacgcggtgggcgacagcgtatgcggctacggcccgctctccgagacggtcatcattaacgcagtgaataactacaagctgcgcaaaatgccgcaaggcagctcctggaaaaacgccgtctgctacgacccggcgcagtttgccatgagcggcgtgcgcgatgccaacgtacgcgtaggggattttgtcgtggtggtcgggcttggcgcgattggtcaaattgccattcaactggcaaaacgcgctggcgcgtcggtggtaattggcgtcgatcctattacccgtcgttgtgatattgcccgtcgccacggtgcggatttctgtcttaaccccattggcgctgacgtaggtaaagagatcaaaacgctgaccggcaagcagggtgccgatgtgattatcgaaaccagcggttacgccgacgcgctgcaatcggcgctccgcggtctggcctacggcggcaccatctcctatgtcgcgtttgccaaaccatttgctgaaggttttaacctcggacgcgaagcgcatttcaataacgccaaaattgttttctcccgtgcgtgcagcgagccgaacccggattatccgcgctggagccgcaaacgtatcgaagaaacctgttgggaactgctgatgaacggttatctcaattgtgaagatttaatcgacccggtggtgacctttgccaatagcccggaaagttacatgcagtatgtcgaccagcatccggaacagagcatcaaaatgggcgttacgttttaattcaaaggaatgaaaaaaatgaaaatcggcacacagaatcaggcgttctttccggaaaacattctggagaaatttcgttatatcaaagagatgggtttcgatggttttgagatcgacggcaaactgctggtcaacaatctcgaagaagtcaaagcagcaatcaaagaaaccggtttaccggtgaccaccgcctgtggtggctatgacggttggattggcgactttatcgaagagcgtcgacttaatggcttaaagcagatcgaacgcattcttgaagcgctggcagaagtgggcggtaaaggtatcgtcgttccggctgcatggggcatgtttaccttccgcttaccgccgatgacctcgccgcgtagcctggacggcgaccgcaaaatggtgagtgattccctgcgcgtactggaacaggcggccgcacgtaccggaaccgtggtgtacctcgaaccgttaaaccgctatcaggatcacatgatcaacaccctcgccgatgctcgtcgttacatcgtcgaaaacgatcttaaacatgtacagattatcggcgatttctatcacatgaatatcgaagaagataacctggcgcaggcgttgcacgacaaccgcgacttgctcggtcatgtgcatattgccgataaccatcgttaccagccgggcagcggcaccctcgatttccacgcgctgtttgaacagctgcgcgccgataactatcagggttatgtggtgtatgaagggcgtatccgggcagaagatcctgcccaggcgtaccgtgattctttggcctgggtgcgtacctgctaagaggtctttgtgaaaagtgcaatgacaagctctccgctgcgagtcgcgatcataggcgcgggccaggtggcggataaagttcatgcttcgtactactgcacccgcaacgatctggaactggtggctgtctgtggcagccgcctttcccaggcgcaggcgctggcagaaaaatacgggaatgcatccgtgtgggacgatccgcaggccatgctgctggcggtgaaacctgatgtggttagcgtctgctcacctaaccgttttcattacgaacataccctgatggcgctggaagcgggctgccatgtgatgtgcgaaaaaccgcccgccatgacgccagaacaggcgcgggaaatgtgcgataccgcgcgcaaacagggcaaggtgctggcctacgactttcaccatcgttttgcactcgatacgcaacagctgcgtgaacaggtgaccaacggcgttttgggagagatttacgttaccaccgcccgcgccctgcgtcgttgcggtgttcccggctggggtgtctttactaataaagaattgcagggcggaggcccgctgatcgacatcggcattcatatgctggatgcggcgatgtatgtgctgggttttccagcggtgaaaagcgtgactgcgcatagctttcaaaagatcggcacgcaaaagagctgcggtcaatttggcgagtgggacccggcaacctacagcgtcgaagattcgctgtttggcaccattgaatttcataacggcggcattctgtggctggaaacgtcatttgcactcaacatccgcgaacagtcgattatgaacgtcagcttttgtggtgataaagccggggcgacgctgtttccggcacatatctacaccgataacaacggtgaattaatgacgctgatgcaacgggaaatggcagacgacaaccgtcatctgcgcagtatggaagcctttatcaaccacgtacaaggtaagcccgtgatgatagccgacgccgagcagggatacatcatccagcaactggtggcgacgctttatcaatccgcagaaacagggacgcgtgtggaattatgatcaggccagtaacgttaacggaaccccatttcagccagcataccctgaacaagtatgcttcgctgatggcgcaggggaacggctatcttgggcttcgcgccagccatgaagaagattacacgcgccagacccgtgggatgtatctggcagggctttatcatcgggcgggtaaaggtgaaatcaacgaactggtgaacctgcctgatgtcgtggggatggagattgccataaatggtgagattttctcgttatcccgcgaagcatggcagcgtgagcttaactttgccagtggcgaattacgccgcaacgttgtctggcgtaccagcaacggcgcaggttacaccatcaccagccgtcgctttgtttcggcagaccaactgccgctcattgcgctggaaatcactattacgccactggacgccgacgcgttagtgctgatttcaacaggcattgacgccacgcaaaccaaccacggtcgccaacatctcgacgaaacccaggtgcgggtatttggtcagcatctgatgcaggggatctacaccacccaggatgggcgcagtgatgtggccatcagctgttgctgtaaggtgagcggtgatgtgcagcaatgctataccgccaaagagcgccgtttactgcaacatacctgcgcgcagcttcacgcaggtgagacgctgacgctgcaaaaacgggtgtggatcgactggcgggacgacagacaagccgctttagacgaatggggcagtgcgtcgcttcgtcagcttgaaatgtgcgcgcagcagagttacgaccaacttcttgcagcatcaacagaaaactggcgtcaatggtggcagaaacgtcgtatcacggtaaacggcggcgatgcgcacgatcagcaagcgttagattatgcgctttatcacctgcgcatcatgacgcctgcccacgatgagcgcagcagcattgcggcgaaaggtttaaccggcgaaggctacaaaggccacgttttctgggatacagaagtatttttgctaccgttccatctgtttagcgatccgacggttgcccgaagtttactgcgttatcgctggcacaacttgcctggcgcgcaggagaaagcgcgacgcaacggctggcagggcgctctgtttccgtgggaaagcgcgcgtagtggcgaagaagagacgccggaatttgccgccattaacattcgtaccgggttgcggcaaaaagtggcctctgcgcaggcggaacatcatctggtggccgatatcgcctgggcggttattcaatactggcggaccacgggggatgaaagtttcattgctcatgaaggcatggcgctacttctggagacggcaaagttctggattagccgcgcggtgagggttaacgaccgtctggaaattcatgatgttattgggccagacgaatataccgaacatgtcaataataacgccttcaccagctatatggcgtattacaacgtccagcaggcgctgaatatcgctcgtcagtttggctgtagcgacgacgcgtttattcatcgtgcagaaatgtacctcaaagaactgctgctgccagaaattcagcccgacggcgttttgccgcaggatgattcgtttatggctaagccggtgattaatctggcgaaatacaaagcggcggcggggaagcaaaccattctgctggattattcacgcgcagaagtgaacgagatgcagatcctcaaacaagctgatgtggtgatgctcaattacatgctgccggagcagttctcagcggcatcgtgtcttgccaatctgcaattttatgaaccgcgcactattcacgactcgtcattaagtaaagcaatccacggcattgttgccgcacgctgtggcctgctgacccaaagttatcagttctggcgcgaggggactgaaatcgatcttggtgctgatccacatagctgtgatgacggtatccacgctgccgcaactggcgctatctggctgggggcgattcagggttttgccggggtgagcgtgcgtgacggtgaattacatctcaatccggcgttacctgagcagtggcaacagttgtctttccctctgttctggcagggctgcgaattacaggtcactctcgacgcgcagcgtattgcgattcgaacttctgcgcccgtttcactgcgcttgaacggtcagcttatatctgtggctgaagaatctgttttctgtttgggggattttattttgcccttcaatgggaccgctaccacgcatctggagggtgaatgaaactgcagggggtaattttcgatctggatggagtaatcacagataccgcgcatctgcatttccaggcgtggcagcagattgccgctgaaattggcatcagcattgatgcgcagtttaacgaattcctaaaagggatcagccgcgatgagtccctgcggcgaattctgcagcacgggggtaaagagggcgattttaacccacaggaacgggcgcaactggcgtatcgcaaaaatctgctttacgtccactcactgcgcgaactgacggttaatgctgtgctgcctggcattcacaatttgctggtagatctccgagcacagcagattccggttgggctggcttctgtctccctgaatgcgccgacgattttagcagcgctggagctgcgcgagtttttcaccttctgcgcggacgcttcccaactcaaaaattcgaaaccggacccggaaatctttctcgccgcctgtgcagggctgggcgtgccgccacaggcatgtatcggcattgaagatgcgcaggcgggcattgaagccattaacgccagcggtatgcgctcggtggggatcggcgcgggcttaaccggggcgcaattattgttgccctcaacggactccctgacctggccgcggttatcggccttctggcaaaacgtatagcaaaggaatcaacatggcacagctttcgttacaacatattcaaaagatctacgataaccaggtgcatgtggtgaaggacttcaacctggagattgccgataaagagttcatcgtgtttgtcggtccgtcgggctgcggtaaatcgaccaccctgcgtatgattgccgggcttgaggagatcagcggcggtgatctgttgatcgacggcaaacgaatgaatgacgttccagccaaagcacgcaatatcgcgatggtgttccagaactacgcgctgtatccgcatatgacggtctacgacaacatggcgtttggcctgaagatgcaaaaaatcgccagagaggtgattgatgagcgggtgaactgggcggcgcaaattctcggcctgcgtgagtacctgaaacgcaagccgggcgcgctttccggcgggcaacgtcagcgagtggcgcttgggcgggcgattgtgcgcgaagcgggcgtgtttttaatggatgagccgctctctaacctggatgccaagctgcgcgtgcaaatgcgcgcagagatcagcaagctgcatcagaaactgaacaccaccatgatctacgtgacccacgatcagaccgaagcgatgaccatggcgacgcggattgtcattatgaaggatgggattgttcagcaggtcggtgcgccgaaaacggtttataaccaacctgcgaatatgtttgttgccggatttattggatcaccagcgatgaattttattcgcggcacgatcgatggcaataaattcgttacggaaacgcttaaattaaccatacccgaagagaaattagcggttctgaaaacacaggaaagtttgcataagcccatcgtaatgggaatacgcccggaagatattcatccggacgcgcaagaggaaaataacatttccgccaaaattagcgtggcggaattaaccggtgcggaatttatgctctacaccacggttggggggcacgagttagtggtccgtgctggtgcgttaaatgattatcatgcaggagaaaatatcactattcattttgatatgactaaatgtcatttctttgatgcagaaacggaaatagcaatttgctaaatacagggggaaggcattctcccaggataatacaaggaacaataatgaaaaagttattactctgtaccgcactggtgatgtgtgcgggaatggcctgcgcacaggccgaggaaaagaacgactggcactttaatatcggcgcgatgtacgaaatagaaaacgtcgaaggttatggcgaagatatggatgggctggcggagccttctgtctattttaatgccgccaacgggccgtggagaatttctctggcctattatcaggaagggccggtagattatagcgcgggtaaacgtggaacgtggtttgatcgcccggagctggaggtacattatcagttcctcgaaagcgatgatttcagtttcggtctgactggtggtttccgtaattatggttatcactacgttgatgaaccgggtaaagacacggcgaatatgcagcgctggaaaattgcgccagactgggatgtgaaactgactgacgatttacgtttcaacggttggctgtcgatgtataaatttgccaacgatttgaacacgaccggttacgctgatacccgtgtcgaaacggaaacgggtctgcaatataccttcaacgaaacggttgccttgcgagtgaactattatctcgagcgcggtttcaatatggatgatagccgcaataacggtgagttttccacgcaagaaattcgcgcctatttgctgctgacgctcggcaaccactcggtgacgccgtatacgcgcattgggctggatcgctggagtaactgggactggcaggatgatattgaacgtgaaggccatgattttaaccgtgtgggtttattttacggttatgatttccagaatggtctttccgtttcgctggaatacgcgtttgagtggcaggatcacgacgaaggcgacagcgataaattccattatgcgggtgttggggtgaattactcgttctgataatgtgctaaattgccggatgcggggcgagcgccaaatccggcatacatttatttcaacgacatatgcgtagcaacggtaatattttgtggtgacggttttccggcaattagctggaataataactcgcagctttgttgacctaactcctgcgtcggaacatcgatgccgcctggtgcaggcgttaatataaacgacagcgtttcattactataacccaccaccgctaactgctgcggaatagcaatgtttttctctgccgccgcacgataaatactcattaatttcaggctgtcagtagcaaacactgcctcaggcaacggtgactggcttaataattcccgtgctgcttttaatgctgtctcatgggtataaccgccgtcaacaatccattcatcacgcactgcaatattatgcgtagccaggctttgcttataaccatttacccgatccactgaaacatgaacatcaagcggcgcatgcaggcatgcaatattcttatgcccgctttcaattaacgcatcggttagcgcaatactgtcgccataattatcggtatcgacggaataaacatggctgtattgaccttcaactttaccgatcaccaccaccgggatctcgtatttgtcgagttgtgcaaagaaggattcatcggcaggcgaacttagcataataatgcctttaatcattttctgcttaattttgctttcgcatttttgcagatcttctgctggattgtgcgacgtttgtaatatcacgtcgaaaccttcttcttccgctttggcggtgatggcatgcaaaacttcagagaaaaacggattacccgccgtagttttggtcgaacgggtagaaatcaccataatggcatcaaaacccgaagaggtcagcgcgcgggccagcttgtttggttgatactgtaattcttcaatggcccgtaacactttttcgcgcgcttccggggagatattggtttgcttattcagcacgcgtgatacggtggattttgatacgcctgcaaccctggcaatatcataaatagtaggggacataggtcaggaactccgtccgaacgtgaatgctgcacatcttatggagttcgcccgtcgatgacaacacgggtagttgataatcaatggcctggcccccacattcatattcttacgaacgattttttttctggtcttcagagcagcacaggacagcaatgaagcgacttaaaaatgaactcaatgcgctggtgaatcggggtgtcgacagacatctgcgcctcgctgtaaccggacttagccgcagcggcaaaacagcgtttatcaccgcgatggttaatcagttgctcaatattcatgccggagcacgtttgccgcttttaagtgcggtgcgtgaagagcgcctgctgggcgtaaaacgcattcctcagcgtgactttggcattccgcgcttcacctatgatgaaggactggcgcagttatatggcgatcctcccgcctggccgacgccaacgcgcggcgtcagcgaaattcgcctggcgctacgctataaatcgaacgattcgctgctgcgccactttaaggacacctccacgctgtatctggagattgtggattaccccggcgaatggttgctcgacctgccgatgctggcgcaggactatttaagctggtcgcgccagatgacgggcttactcaatggtcagcgcggcgaatggtcggcgaaatggcgaatgatgtgcgaagggctggacccgctagcgcctgccgacgaaaaccgactggcagacattgccgccgcgtggaccgattatctccaccactgcaaacagcaggggctgcactttattcagccaggacgctttgttttgcctggcgatatggcaggagcgcccgcgctgcaattcttcccatggccagatgtcgatgcctggggcgagtccaaactggcgcaggccgataagcacaccaatgccggaatgttgcgcgagcgttttaattattactgcgagaaagtggtgaaggggttctataagaatcacttcctgcgttttgaccgccagattgtgctggtggactgcctgcaaccgctcaacagtggaccacaggcatttaatgatatgcgtctggcgctgacgcagctgatgcaaagtttccactacgggcagcgtaccctgttccggcgtttgttttcgccggttatcgataagctattgtttgctgccactaaagcggaccatgtgaccatcgatcagcacgccaatatggtttcattgctgcaacaactgattcaggatgcctggcaaaatgcggcgttcgaagggatcagtatggactgcctggggctggcgtctgttcaggcgaccaccggcggaattattgatgttaacggtgagaaaatcccggcgctgcgcggtaatcgactcagcgatggcgcaccgctcactgtttatcctggcgaagttcccgcacgtttgccaggtcaggcgttctgggataagcaaggcttccagtttgaggcgtttcgtccgcaggtgatggatgtcgacaaaccgctaccgcatattcgtcttgatgctgcgctggaatttttaataggagataaattgcgatgaccgaaccgttaaaaccacgtattgatttcgacggtccactggaggtcgatcagaatccaaaattcagggcgcagcagacctttgacgaaaatcaggcgcaaaattttgccccagccacgctcgatgaagcgcaggaagaagaggggcaagttgaagcggtgatggacgcagcgttacgtccgaaacgcagcctgtggcgcaaaatggtgatgggcgggctggctctgtttggcgcaagcgttgtcgggcagggcgtgcagtggacaatgaacgcctggcaaacccaggactgggtggcgctgggtggatgtgccgctggggcattgattatcggcgctggcgtaggttctgtggtaacagagtggcggcgcttatggcgcttgcgacagcgcgcccatgaacgcgacgaagcgcgcgatttgttgcacagtcacggcacgggtaaaggccgtgcattctgcgaaaaactggcgcagcaggcgggcatcgatcagtcacatccggcgctgcagcgctggtatgcctcaatccatgaaacgcagaacgatcgtgaagtggtcagcctgtatgctcacctggtccagccagttttagatgcccaggcgcggcgcgaaatcagccgctcagcggcggaatcaacgttaatgattgccgttagcccactggcgctggtggatatggcgtttatcgcctggcgcaatctgcgtttgattaatcgcatcgccacgctgtatggcattgaactgggatattacagccgtttgcgcctgtttaagctggtattgctgaatattgcttttgccggagccagcgaactggtgcgcgaagtggggatggactggatgtcgcaagatctcgctgcgcgtttgtctacccgcgcagctcaggggattggtgctggacttctgacggcacgactggggattaaagctatggagctttgccgcccgctgccgtggattgacgatgacaaacctcgcctcggggatttccgtcgtcagcttatcggtcaggtgaaagaaactctgcaaaaaggcaaaacgcccagcgaaaaataatgcaatatcgggtgctgaccggatatctttacgccgaagtgcccgtttttccgtctttgtgtcaatgattgttgacagaaaccttcctgctatccaaatagtgtcatatcatcatattaattgttcttttttcaggtgaaggttcccatgcgtctggaagtcttttgtgaagaccgactcggtctgacccgcgaattactcgatctactcgtgctaagaggcattgatttacgcggtattgagattgaccccattgggcgaatctacctcaattttgctgaactggagtttgagagtttcagcactctgatggccgaaatacgccgtattgcaggtgttaccgatgtgcgtactgtcccgtggatgccttccgaacgtgagcatctggcgttgagcgcgttactggaggcgttgcctgaacctgtgctctctgtcgatatgaaaagcaaagtggatatggcgaacccggcgagctgtcagctttttgggcaaaaattggatcgcctgcgcaaccataccgccgcgcaattgattaacggctttaattttttacgctggctggaaagcgaaccgcaagattcgcataacgagcatgtcgttattaatgggcagaatttcctgatggagattacgcctgtttatcttcaggatgaaaatgatcaacacgtcctgaccggtgcggtggtgatgctgcgatcaacgattcgtatgggccgtcagttgcaaaatgtcgccgcccaggatgtcagcgccttcagtcaaattgtcgctgtcagcccgaaaatgaagcatgttgtcgaacaggcgcagaaactggcgatgctaagcgcgccgctgctgattacgggtgataccggcaccggaaaagatctctttgcgtatgcctgtcatcaggcaagccccagagcgagcaaaccttacctggcgctgaactgtgcgtctataccggaagatgcggtcgagagtgaactgtttggtcatgctccggaagggaagaaagggttctttgagcaggcgaacggtggttcggtgctgttggatgaaataggtgagatgtcaccacggatgcaggcgaaattactgcgtttccttaatgatggcaccttccgtcgggttggcgaagaccatgaggtgcatgtcgatgtgcgggtgatttgtgctacgcagaagaatctggtcgaactggtgcaaaaaggcgtgttccgtgaagatctctattatcgtctgaacgtgttgacgctcaatctgccgccgctacgtgactgtccgcaggacatcatgccgttaaccgagttgttcgtcgcccgctttgccgacgagcagggcgtgccgcgtccgaaactggccgctgatctgaatactgtacttacgcgttatgcgtggccgggaaatgtgcggcagttaaagaacgctatctatcgcgcactgacacaactggacggttatgagctgcgtccacaggatattttgttgccggattatgacgccgcaacggtagccgtgggcgaagatgcgatggaaggttcgctggacgaaatcaccagccgttttgaacgctcggtattaacccagctttatcgcaattatcccagcacgcgcaaactggcaaaacgtctcggcgtttcacataccgcgattgccaataagttgcgggaatatggtctgagtcagaagaagaacgaagagtaagcgtgaatatgcctgatggtgcaacaccatcaggcatattaacttatgctttcagtacagccagagctgcttcgtaatccggctcggtggtgatttcatccaccagctggctgaaaatcacattgtcattttcatcaataaccacaacggcacgcgctgccagacctttcagtgggccatcagcaattgccacaccgtaggcttgcaggaattcagcgttacggaaagtggagagggtgataacgttgttcagaccttctgcgccgcagaaacgagactgggcgaacggcagatcggcagagatacacagcacaacggtgttgtcgatctcggttgccagttggttaaacttacgtactgatgcggcgcaaacaccggtatcaatactcgggaaaatgttcagcactttgcgtttacccgcaaactgaccgagggtgacgtcagacagatcttttgccacgagagtaaaagtctgcgctttgctacccgcctgcgggatggaattggcgactgtaaccgggttgccctggaaatgaacggtttgtgacatgattatctttcctgtttacatatagttaacgtcacacctagtttatgctaactgtcaataacacagcaaacgctatttgcgcttaatccgcagaccaccgcgacaacaaggagtaaagatgagaaccgttaaggtatttgaggaggcctggcccttacataccccgtttgtgattgctcggggaagtcgcagtgaagtgcgcgtggtggtggttgaactggaagaagaaggtattaaaggcaccggcgaatgcacgccgtatccgcgttatggggaaagtgatgcctcggtaatggcgcaaattatgagcgtcgtgccgcaattagagaaagggctgacacgggaggagttgcaaaaaatcctccctgccggcgcagcacgtaatgcgctggattgtgcattgtgggatctggcggcgcgaaaacagcagcaatcgctggctgatttgatcggcataacgcttcccgagacagtcaccacggcacagacgatagtcatcggtacgcctgatcagatggccaatagtgcatcaacactctggcaggcaggcgcgaaattactgaaagtgaagctggataaccatcttatcagtgagcggatggtggcaattcgcacagctgtgcccgatgcgacgctgatcgttgatgcaaatgaatcctggcgtgcagaagggttggcggcgcgttgccagctattggcagatttaggcgttgcgatgcttgaacaaccgcttcctgcgcaggacgatgcggcgctggagaattttattcatccgttaccgatttgtgctgatgaaagttgtcatactcgtagcaatctgaaggcgctgaaagggcgctatgagatggttaacattaagcttgataaaaccggtggtctgacggaagcgctggcgctggcgactgaagcgcgtgcacaaggttttcgtctgatgctgggctgcatgttgtgtacctctcgggccattagcgccgctttaccgctggtgccgcaggtcagtttcgccgatcttgacggaccgacctggctggcggtagatgtggaaccggcgcttcagttcacgacgggcgaattgcatctttaggatgccagcgcagcaagtttgccatcgcaaagagatatttttcgctggcttcgtcggaggagatgggtggaaactctgcggtgatgcaatgcaagttgagatctgcacaccaactgccgaaagagccaggcgtttcataaccgacgctggttaccagaggcaattcaaacgcctgggccagccattcacctaattcgctgtgtctgggatcttcaatacaggccagcggatcgtggaatgagaccacctaggcaggttgaatgcggtgtataagttggcacagcgcctgggtttcaggttcggagccaggtttgtcacctgtcagtaaaacgacatcacgttcttcagcggcgctgttccagcgataaactgtttcaccttccttccagttcgctgccggaaagtttcggtttaaatccacaccattagcattggcccgtaaccctaactggcagccgtcaggattcacacacagcaccacatgatggcggcgcaaagacggtgtcaaagtccgcagagcacaggagagcgtgacgatcgaagagttttcatcaccgtgagtgccagccagaatcaaaccactttcgtgactggcggctggggccggaaaccagattaacggcgcgcccaataatgaacgtccgtaatgttctgttccgggcggaaatgcgccgcgttcggcgcgtgggcgagttacggtcatgatcgtctctggttcaggaagtattacaggcagtgttgtgcaaattttgcggattatcaaatccttttcttcaacgctatgccatcgatcttgtatcacttttttgccggaagttgtttgtattttcattgatgtgcagatattagaattgtcgtaatgttatatacatggcgtattttattcttactggttctacacatgttaatcgcatctgattgatcagttcaccttaataagtttaataaatcgtactgcacatagtacagtacgatggtagctatataattgatttacatgaagaagggcttatcaccatcagtcccgggttgattgatgcctatattctcaccaatgtgtttctcaggtttattgatgatatctgtgattaatgctgcgacactcttacgtgatacgatcgtacctttgaatggttcattgcgtgaggtaagctcataatcaataatatcttcatcagtcagccaggcagggcgaagaattgtatattccagtccagaagcctcaattgcatccgcagccctgcggaatggttttaggggttcaccaataactgcattattccattcgccaaattttcctggaacttcattataaataccgagggaaagaacaaagatcagacgtttaacatcacaggctttcatcgcagcgatcactgaatttgcctgaatatctaaatcttcccccgtaaggttggcatacacaacatcctgtccctgcatggcctgcttcagtgctgcatgattcagtacatcccccataataatcttgctattagttggatagggtttgtggatttttgctggctgacgggcaaataaagtttgtttaatggtttgtttatctgccagttgattaatcacatggcgggctatctgaccgccagcaccaagaatcagtacatttttcatgaaacttttcccagattattggcagcaatatgccaggccatatcactattacggatttgaatatgtttcattacagagtttcctcaaagaacggagctaatactgaaattgcttcagccacatagactttgccatcataaagatccatatggtttgcgccttcaacaatgtgatagcgtttatcctggcttgatgctcgatcgtacaggtcgtcactcatccatttgctcccagcctggctgcccgccacaatctgtatcggctgagtcaggtacacttccgccatatggtaagcatcataggtaataatctggttaaggctgcgcaaagtagcgtaacccggtgctgttggatactgcgcgcgaggggtgtggtaatactcccaggcctgacgcagttcttcgttcggcgcatcggactccttcattggtgccagtggcatagtggcgtattctccgctgctaatatcgctggttcgggcgtttgaacccgcgtcaacgtatggtagggcatcaatagatttcacattgttttcccaaccattacggaacatcgaaccaatattgaccgcactaacagtaccgatggccttgatgcggcgatcctgaattgcagcattggctgtatatcctgctccggcacaaattcccatcgcaccaattcgggtattgtcgacataagaaagcgttgtcaggtaatcaatcacggcactgacgtcttcagtacgaatgtatgggttttctaactgacgcggctcgccgccgctttcaccttgataagatgcgtcataagcaatagtgacaaatcccttttccgccagtttttcggcataggttccggccgtttgctctttaacgcccccacctgggtgagataccacaattgccggatactgacgggtttcatcaaattttggagggaaatagatcactgcagacaaagagatggttggattattgctgttagtgacgctgactttattattcatcattccgttcctcatggagttgtcggttcgttttaacggttggtgatatcactatagatattgatcattaagttgattagacccaaaatcatgattagacctatcatttaaatgattaatagattgtatggagatactgaatgaagcgtgaagaaatcgctgatctgatggcgtttgtcgtcgttgcagaggagcgtagcttcactcgcgcagcagcccgcctgagcatggcgcagtcagctttaagccagatagtgcgccgtatagaagaacgattgggattgcggcttctgacgcgaaccacgcgcagcgttgtacccactgaagcgggcgagcatcttttgtctgttcttggccctatgttgcatgacatagattctgccctgacatccctgagcgatctgcagaaccgcccatccgggacaatacgtattactactgtagaacatgcagcaaaaacgatattgttaccagctatgcgcacattcctgaaatcgcatcctgaaattgatattcagcttaccattgattatggtttgaccgatgtcgtttctgaacgttttgatgcaggcgtccgtctgggtggggagatggataaagatatgatcgccattcgaatcgggccagacataccaatggctattgttggctcaccggattatttttctcgtcgaagtgctccaacgtcagtgtcacaattaatagatcatcaggcaattaatttgtatcttcccacatcgggtacagcaaatcgctggagattaatacgcggtggacgtgaagttcgtgttcgcatggaaggtcagcttttactgaatacgatagacctgatcattgatgctgcaattgatgggcatggattggcgtatctaccttatgatcaggttgagcgggctattaaagaaaaaaaactgatacgtgttttggataaattcacaccagatttacccggttatcacctgtactatccacaccgtcgacatgctggctcggcattctcattatttatagataggctgaagtataaaggtgctgtttagcactacttgctgatacattaatttaattcttctcttaacgtattctcagttcctttcaacgttttggttattttttattcttcgcacaatggcgacagatgctgattatgataccgaaaacgggtttgaacgtgcgaagcccgaacgtagtgttcggagttctatgtgctttaccgcattttggagactattatttacactaaatctgatttgatatattgatacttaaaacatttgatgcttcctttgtcacttttttgatggaagttgtttgcatttctttaaggcgaaacaaataattacgcatcaattttaatgtcggttagagggaaacttatgaagcactctgtttcagtcacgtgttgtgcgctgttggtcagcagcatttctctttcgtatgctgctgaagttccgagcggcacagtactggcagagaagcaggagctggtgcgccacattaaagatgagccagcgtcgctggatcccgctaaagccgtgggcctgccggagattcaggtcattcgcgatctgtttgaaggactggtgaatcagaacgagaaaggggagattgtccccggcgttgcgactcagtggaaaagtaatgacaaccgtatctggacttttaccctgcgcgataacgcaaaatgggcggatggcacaccggtaacggcgcaagattttgtctacagctggcaacgtctggtggacccgaaaacgctatcgccatttgcatggtttgccgcgctggcgggaatcaacaacgcacaggcgattattgatggtaaagccgcgcctgaccagcttggcgtcaccgcagttgatgcccatactttgaaaatccagcttgataaaccattgccgtggtttgtgaatttaaccgctaactttgccttcttcccggtgcaaaaagccaacgtagaaagcagtaaagagtggacgaaacccggaaatctgatcggcaatggcgcttatgttcttaaagagcgcgtagtcaatgaaaaactggtcgtggtgccgaatacccattattgggataacgccaaaacggtactgcaaaaagtgaccttcctgccaattaatcaggaatccgcagccactaagcgttttctcgcgggggatattgatatcaccgaatccttcccgaaaaatatgtatcagaagctgttgaaggatattccggggcaggtttatacgccgccgcagctcgggacctattattatgcgtttaacacgcaaaaagggccgacggcagatcagcgcgttcgcctggcattaagtatgacgatagatcgccgcctgatgaccgaaaaagtgttggggacgggcgaaaagccagcgtggcattttacaccagatgttaccgcgggatttacgccggaaccttcgccgtttgaacaaatgagtcaggaagaactgaatgcgcaggcaaaaactttgttgagcgccgctggttatggtccgcaaaaaccgctgaagctgacgcttttgtataacacttcagaaaaccatcaaaaaattgcgattgctgtagcatcgatgtggaaaaagaacctgggcgtagatgttaaattgcaaaaccaggaatggaaaacctatatcgatagccgtaataccggcaattttgatgttatccgcgcctcgtgggtaggggattataatgaaccctccactttcctgacattattaacgtcaacgcattccgggaatatttcacgctttaacaatccggcatatgacaaagttctggcccaggcatcgacggaaaataccgttaaagcgcgtaatgccgattacaacgcggcagaaaaaatcctcatggagcaagcaccgattgcaccaatttatcaatataccaatggacgattaatcaagccgtggctgaaaggttatcccattaataaccctgaagatgtggcgtacagtcggactatgtatattgtgaagcattaatgtgatgggaactggcgttacccttgtggataacgccagtgatgtctgatttagcgaccctggtccggcggtgtaatgttatccatatacagcgtctggctggggaaggcaaagtccgcgccgtgtgactgtacaatatcgataatcttcaaataaacgtcttgctgtgcagcaagccactcagcccataccgtggttttggtaaagcaataaaccataatatttaatgacgaatcagcaaactggttgaaataaaccagtaaggtttgtcgctggtcgatggccgggtgatttttcagcatctcacgtacggcttcgacaataacgcccacttttgccgcatcctcataacgtaaaccaatggtcgtggtaatgcgccggttggtcattcgtccaggattttctacgctgatcgacgaaaacagcgagttcggtacgtacaatggacgattatcaaaggtcttaattttggtaattcgccagccaatttccgctactgtaccttcgatatttctgtccggtgaacggatccagtcgccaatactgaaaggacggtcgaaatagagcataatcccggaaaagaagttactcagaatatctttaccggccataccgacagccagaccaccaataccaccaaaggtcaacaagccagaaaggctcatgccgaaatgttcgccataaagcagaacaagcaccacaataatggtgattttgataatgcgcgacatgatccgcgcactggtgatatcgcgaccttttttaatctgctgtttttcaaactgattaatcagcagaaatagcttaatcgtcagaataaccgcaatcagggacgtacagataaaatcgataacgcctggggtgataaatttgagtttatagttttctataacatagttaatgatgctaccaacagcactaataattatggtgtagattaaaaattgcaccgcatggaataaaaatccttttcttttacgatttccacggcgaaaccaaaagctcatcagaatcaatgctgcgcagctaccgaaaataatgaccagattaagcgcattatttgtaaacagttcagcgatcattgttttatcaggctcctccagataattgtcgtcatgccggaaacccctggcgggactattttaccgcgacaattcattcagatcatcaatagtcagggaaggaagtagcaacattagctaactaatcaatgcgttgattgtaaatccagctaagaggtgagattttcagagcagacaacggtaaaatgtcatggtattgttacgtttaggtaacaagaaatttgtctgcacaaggattacatcatgattatggcgaaactgaagtcagcgaaagggaagaaatttctctttggtttgttggcggttttcattattgcggcgtcggttgtgactcgcgcgaccatcggcggcgttatagaacagtacaatattccgctgtctgagtggacgacatcaatgtatgtgattcagtcatcgatgatttttgtttatagcctggtctttactgtgttgctggcaatcccgttgggaatttatttccttggcggcgaagagcagtaagtaaaaaataggcccgataactcgggccttgtcagttattgaagagtcgttaatcgtcttcttcgtcatccagttcaacgggtgtctgatactggtcaggtttaatgaccagcaggtcgcagcgaagatgatcaatcacctgttccgccgtgttgccaaggaatgctgctgaaataccggtgcgtccgaccgtgcccagaaccacaatccccgcctgtaagtgctccgccaaatcaggaatcacctcttcgggcagacctttttctacgtgcgtcatgttttcattaatgccgaatttctgtcgcagagctttcattgccagcaaatgttgcccacgaatggcatcgttataaacgctcgggtcaaattccggcagttcaatcgcgatattaattggcgttaccggataagcgccaaccagatgaacttcggtatggttgacttgttctgccagttcgatcgtctctttgaccagtttttcattgagcgcattatggtacggctcttcactggcgagattcaccgccaccagcgccttacccccttccggccacggctggtctttcaccatccacacggggcttgggcatttgcgtaacagatgccagtccgttggcgtaaaaatcaccgcttccagacggtcatgttggtgcgccatttttagcaccaaatcgtgcccgccgctgatcacttcctgaatgatggcttcgaaaggacggttatgccagaccactttaatttcaatgggaacgccagcattgagataatattttgcctgctcgtggatccaggctgtacgctggctgatgacgccctgacgcatagcggtacgttcgtccggagagagcagggtggtcatttcgtatgagaagtcatagatcggcaaaaaggctttaattttgccaccaatccgttgatgtaaataaacagctcgccgcaatgctggttggtcgtcctggttaggatcgataacaacgagcatgttctgatacatagccatacagggtctccttacaacaactgtcaacgcagtttgtaattaaaagattaacccatatctggtgaatgaaacagtgatgaaccttctgtcagatcaataaatcagaaaaatttaatgatatgacagaaggatagtgagttatgcggaagaatcaggcaacgttacgcgtatgaccagcaagctgggccagcgcatcgttattttcgatagtgatgtatttacctttgactgccagcataccgcttttctggaagcgacccagcagacggctgatggtttcaaccgtcaggcccagatagttaccgatatcaccacgagtcatcgtcaggcggaattcacgaggggagaagccgcgttgggcaaaacgacgggacaggttgtagatgaatgcagccagacgttcctcggcatttttcttcgacaacagcaggatcatgtcctgatcgcctttgatttcaccgctcatcagacgcatcatctgctgacgcagattcggcattttaccagacaaatcgtccagcgtttcgaacgggatttcacataccatcgaggtttccagcgcctgcgcgaaactcgggtgatgaccgctgccgatggcatcaaatcccaccagatcgcctgctaaatggaaaccagtgatttgctcgtcgccttgctcagtgatggtataacttttaatcgtaccggagcggatggcataaagcgatttaagttcatctccagccttaaacagcgtctggcctttctgaataggcttcttccgctcaatgatattatcaagctgatcaagctcatgttcgttgagtgtgaacgggatgcaaagctggctgatgctgcaatcctggcaatggatagcacaaccgccagactgaatgcgccgtataattcgcttttccgggatcataggtctgctcaagccgtaattgatatttgtcaattttaacatctttttagggagcaagtaagtctaagcaaaccttaacagcagagaattccgatattagatgtaaatatatgtctatctatttgaaaacccttaagttgttaagggtgactttacataaaagtgtgaacaagctggcacaaattgtttaatgtttacagcaaaagataaccttcgtggcgcaataaccactcttttcgcagaactccgcctgcatatccggtcatggtgccgtttcggccaataacccgatggcaaggtacgacgatgctgatgggattcgatccgtttgccgcaccaacggcacgcgccgcgccagggcggcctaattgttcagccagttggccataatgcattacctgcccgcaggggatagtgcgcagtgttttccagacttcgcgctgaaatggcgtcccccccgtggcagtgggaagcgtatcaataatgctaagattaccggcaaaatattcacgaagcttgtcgcttaaaccacctgggttggtggcagaaatgcgctcatagctttctttgcgataatggatgtccagcagctgcaccatgcgttcgctgtactcttcccattcaaccgcccgcaggcgaaattgctcatcgcaaatcacccacagtggacccagtggcgtggcaattttttcttcaagtaatctcagcatccgttctctcttaagacaaacgtgggtaaatacccggacctgtcggcaagccaacaagataccacgccagcaacatcagcagccataccaccaaaaagattaatactaacaaaaagtaagtaccaggtttcgcgtctggtttgtcgcagtatttaagcataaagcgattttttgatttttctgcctgaagaaatgagggcaagccatcaaattccagtcagcgaaattttaccgtaggctatccgttatttgattctgtggcgtgatagccgccagacaccactgatctcgtcactcattccccaatcccggcgagaatgtggttatttacagagctaaaaaatgaataaaaaaatagagcctgtcgacatccgccagactctacagtacacacagcagtgcatcctcgtcttaaatccggcctggggtcctggtgaccggtgacagtgttataacggttttacccatccgttgccaattttcttcagtgacagatttcacgaaaatataagttaaatcatttgccttgtgattgcataatcatgcatcgttaatcgacgagtaaatttaccgggcgagtagcccgttcgacgcttaaacatattgccgaacgattcagctgaggcatagcccagacgatgggcaattttggtcaacgaatatccatcatcaagaagcgtcactgcagaaataacgtgcatttgctgaacccagtggcgaaatgttaatcccgtctctttaacaaataagcgcatgagtgtacggctactgacgttaattttatccgctagattatccagtgttggcagatacccttggttgtttagcaaattctcacaaagctgctgtagccgctcatcatttggccaagggagttcaagtgacattttcacccccatttttatttcctgaagtatcagcgtctcgagggctgaaaaacgtaactgttgtttatctgtggtactttgcgacggtggaagttggttaattgcaattagtaattcccttaacaggggtgaaatacccgtcatgaagcaaacttttcccagcgtttcactttccgcttctgaaaccagtacggtttttaaaagtacgttgcctgtcgcaacaaacttatgcggcatttgtgggggcagccaaagcgcgctgctggcatgcactagccagacgctttctccagcccatatacgaacgactccttcagccgggtaaagcaactgggcatagagatgtttatgccagggaactgtgcctccattcagatgttccgaatccagtccgataatgtgatgccctggtgatgctttaggttgcagtgtgattgtcatttacagtaggtattttgtcagaaatcatcaaataagccatgttaaattttaaatatgacgtatgcaagtttccggatatatacggtgtaaagagtgatgataatttctaaaaaacagcttattggggtggtagcgatcggtattcttttggctggcgttgtcttttttatctggtgggtaagcaaaggaagatttatacagacgacggatgatgcttacattggtggtaatatcaccacggtggcaagtaaagtttctggttatatttctgctatagaggtgcgcgataatcagagtgtaaaaaaaggcgatattatcctgcgtctcgatgatcgggattatcgtgcaaatgtcgccagattagagggatttcgcagcagtttgcgatggcccccatcgtaacattaacgctggggggaattccaaaagaacggctgaagttagcctctggtgtatttaatttaacacgtaatcttgggggcgcaattggtattgccctgtgtggctctattctcaataatcgaactaattttcatttttcgagaatgggtgaaaaaatggtttctgttccccatatggtgaatgacttcatttccagaagtgctttgttttttaatcgcagtggaagtgaccagacatcggaaatactggcttcaaccaaattattgagtcaattgatgctgagggaggcgcaaactatggcattttcggatacctttctgctaatcagtggtctgttatttatcgcatttttgttggttcctgctatgaataaatcatcctgatcggagcctgtgctgaattaaactcgggctaaactgttcgatactgctaacaggctagtataaaatgccccgcctgcgcagatactcacaggtatgaagtagagtattgtttcaatctgtgaagggaacgatgcagtaagtatgaacaattaacccgtctgaatcacgacgtgtgaaggtgcataggaggttacatgaaccttgacgacaaatcgctgtttcttgacgccatggaagatgtccagccgctgaaacgtgctacagatgtccactggcatccaacgcgtaaccaacgtgcgccgcagcgtatcgacacgctgcaacttgataatttcctcaccaccggatttctcgacatcatcccgctaagtcagccgctggagtttcggcgggaagggttgcaacacggggtgctggataagctgcgcagtggtaaatatccgcaacaggcgagcctgaatcttttgcgccagccggtggaagagtgccgcaaaatgatgttcagtttcattcaacaagccatggcggatggtttgcgtaacgtgctgattattcatggtaaagggcgggaagataaatcgcatgccaatattgtccgcagctatgtggcgcgctggctgaccgaatttgatgatgttcaggcatattgcaccgcgctaccgcatcatggcggcagcggggcttgttacgtcgcactacgtaaaacggcgcaggcgaagcaagaaaactgggagcgccacgctaagcgcagtcgttgatctcgagacgcatccgcggcttatgccgccagcacgcggttgcgtccatcatttttcgcccgatacaaagcatcatcaacgcgtttaaacagttcatcgatgctttcatttccttcgtgatgcgccacaccaatgctgacggtaaagcgtggtaagctcgaaatactcacttttgccacgcttacgcggatagtttcagccagcgaaagcgcggtatccagtggggttcttggtagcaataagacaaactcttcgcctccccaacgaaacaccaaatcgcctttgcgagcgcaactttcgagagtgcgggcaagggcgcataacacctcatcacctttagaatgcccatagagatcgttaatgtgtttaaaacgatcggtgtcgatgagcaacaagctgtaatcctgagcgatggcgaggtgctgcatttggcctggctcggtaatgtgataaaactgtcgccgattcagtaatcctgtcatcgcatcatggtgggcagcatgttccagctgctcctccagccgtttttgctcagtaatatcatgcacaatacataacatgagcttgtcaccataaatttcaatcggcccggcataggtctgcacatgacgagtcgaaccatccgccagtttatgaacaaaattcaaaggtttatgaccaccgggtaaatgcgagatttcatgcatgataggcatgacgcgacgcccgagcatattaatttcccaggtatgtttctggcacatcgtttcatggttataaccatagaaattgagcgcggcgaggttagcatcgacgatttggccatctcgtgaggggtcaatcaacaacattggtgcagagttagtcagaaaaaagcgcgcataaaaaccttgttttttgcgctgataatttgccgagcgactggcttttaaacccagcgttgccggcgcttcgataccttcgaaaataatcaccggttctgcttctgtcagctttcgcaaaacaagtcgacagctcaatgctgtttcctcttctttacgctgaacggtgagtatttcgataatatcgtgttgattttgcagatcggagaggtatttcggcagttctttttgtgaggagacggaatagggaccggttcgtagctgactaaacgtgaggtcttgcatcaacagtcgcgccgcgctgttggcataaattaactgttcctcaaagggcgaaacgatccagacaggactggtgagtaagtccagggtattgaagttgtgtgtaatcattgagatcccattatttttatcaatttttgttgctatccgatcgcaaaaaagccacgtcatatgatcagataattctgataatgatagacgctatttaacacttcacacggtttgtatacggaaaagcattttgctttttgtattcaatttagacagaattttattaatcatttcagggtaatggggtgatgagatgttgcgtaacagggccagaaggctagactacaaaataatgcgttgatgatggaggcactgtggaagcgattaagggatcggacgttaatgtcccggatgcagtatttgcatggatgctggatggtagaggcggcgttaaaccgctggaaaatacagatgtgattgatgaagcgcatccctgctggctccaccttaattatgtacaccatgatagcgcccaatggctggcgacaacaccgctgcttcccaataacgtacgtgatgcgctggcgggcgagagcacacggccccgagtcagccgtctcggtgaaggcacgctgattacattgcgctgtataaacggcagcaccgatgaacgccccgatcaactggtcgccatgcgtgtatatatggacgggcggttaattgtttcgacccgacaacgcaaagtgctggcgctggacgatgtggtaagcgatctggaagaaggcactggtccgaccgattgcgggggatggctggtggatgtgtgcgatgcgttgaccgatcattccagcgaatttatcgagcagctgcacgataaaattatcgaccttgaagataatctccttgatcagcaaattccaccgcgtggattcctggctctgctgcgcaaacaattaattgtgatgcgtcgctatatggcaccgcaacgtgatgtttatgctcgtcttgccagtgaacgtttgccgtggatgagcgatgaccaacgccgtcggatgcaggatattgccgatcgccttgggcgcggtcttgacgaaatcgacgcctgtatagcacggactggcgtgatggcggatgaaatcgctcaggtgatgcaggaaaatttagctcgtcgtacctatacaatgtcgttgatggcaatggtctttttacccagtacgtttctgacagggttatttggcgtcaaccttggtgggatccctggcggcggatggcaatttggattttcaattttttgtattctgttagttgttcttattggtggtgttgctttatggttgcatcgtagtaaatggttgtaacaaaagcaatttttccggctgtctgtatacaaaaacgccgtaaagtttgagcgaagtcaataaactctctacccattcagggcaatatctctcttgcaggtgaatgcaacgtcaagcgatgggcgttgcgctccatattgtcttacttccttttttgaattactgcatagcacaattgattcgtacgacgccgactttgatgagtcggcttttttttgcctgttatttatcagcgtctaccctttaagagtccacccaatgaccggagggaaatatgacgacacttatttatttgcaaattcctgtccctgaaccgattcctggcgatcctgttccagtacctgatccgatccctcgcccgcaacccatgcctgacccaccacccgatgaagaaccgattaaattgtcgcatcgtgagcgtagatctgcgaggatacgcgcctgctgactttgcgtcgatgaccacgagaatagattgtgaccgctttttctaccctgaatgttttgcctcccgcccaactcacaaaccttaatgagttgggttatttaaccatgacgccggtgcaggccgccgcgcttccggcgatccttgccggaaaagatgttcgcgtgcaggcgaaaaccggcagcggcaaaacggcggcttttggcctcggcttgttacagcaaattgatgcgtcgctatttcaaacccaggctttagtgctgtgtcctacgcgtgaactggcggatcaggtggcaggtgaattgcgtcggctggcgcgttttctgtcaaataccaaaattttgacgttgtgcggtggtcaaccgttcggtatgcagcgtgattcgttacaacatgcgccgcatattatcgtggcaacgccgggccgtttgctggatcacctgcaaaaaggcactgtatcactggatgcgttgaatacgctggtgatggatgaggccgaccgcatgctggatatgggatttagtgacgccattgatgatgtcatccgttttgcgccagcatctcggcagacacttctgttttcggcaacctggccggaagccattgccgcaatcagcggaagagtgcaacgcgatcctttagcgattgaaattgactcaacagatgctctgccacctattgaacaacaattttatgagacatccagcaaaggcaaaattcctctgttgcaacggttattaagcttgcatcagccatcctcttgcgtggtgttttgcaataccaaaaaagattgccagtctgtctgcgacgcgctgaatgaagtagggcaaagtgcattgtcgttacacggcgatctggagcaacgcgatcgcgatcagaccctggtacgttttgctaacggtagcgcccgtgtactggtcgcgactgatgttgctgcgcgtggtctggatataaaatcgcttgagctggtggtgaactttgagctggcgtgggaccctgaagttcatgtacatcgcatcggtcgtacagctcgtgcaggaaatagcggtctggcgatcagtttctgtgccccggaagaagcacagcgggccaatatcatttctgacatgttgcagataaaacttaactggcaaacgctgccagcgaatagttccattgtgccgctggaagcagaaatggcaacgttgtgtatcgatggcgggaaaaaagccaaaatgcgcccgggtgatgtattaggtgcgctgacaggagacatcgggcttgatggcgcagatattggcaaaatcgccgtgcatccggcgcatgtttatgtcgcggtgcgtcaggctgttgctcataaagcatggaaacagttacagggcgggaagattaaaggaaaaacgtgccgggtgcggttattaaaataatgaaatgttgaattgcagggtgcaagagtaaacatcttcttaggcattgccggatgcgacgctggccgcgtcttatccggcctccataagagtagcccgatacgcttgcgtatcgggcgctatcctggttatttcacttcaaccacattcagccgtaactcatccaactgattttcatcttcttctggctgccagcccgctggttgtagtgggatctcttcgcgatcaaacgccagatcacccccgttaaccacttcagaaccgtgggtaatgcctttgaaatcgaacaggttggtatcgcacagatgcgacggcaccacattctgcattgcgctgaacatcgtctcgatacgccccggataacgtttatcccagtcacgcaacatgtcagcaattacctgacgttgcaggttaggctgagaaccgcacaggttgcacggaataatcgggaacgcttttgcatcggcaaagcgctgaatatctttctcgcggcagtaggccagcggacgaatcacgatatgtttgccatcatcgctcatcagtttcggaggcatacctttcatcttgccaccgtagaacatatttaagaacagcgtttgcaggatatcgtcacgatggtgacccagcgcgatcttcgtcgcccccagttccgttgcggtgcgataaaggataccgcgacgaagacgagaacacagtgagcaagtggttttgccctccggaatcttctctttcacgataccgtaagtgttctcttcaacaatcttgtactcaacgcccagcgtttcaagatactcgggcagaacgtgttccgggaagcccggttgcttttgatcgaggttaacagccaccagcgaaaaattgattggcgcgctttgctgcaaattgcgcagaatctccagcatggtatagctgtctttacccccggagaggcaaaccatgatgcgatcgccttcttcaatcatattgaagtcagcaatggcttcgcccacgttacgacgcagacgtttttgtaatttgttcaggttgtattgttctttctttgtaatttgttgattttcttgcattatttcagttctctggtactaagtggggcatattgagggcaaactttgcaactacgataaccgcgcattcaacatggctacctgttcgtcgttcatgtcatcaatccacataccgtaaatttcatacaccatctgcgcagtttcatgccccatctggctggctataaatgccgggttcgctcctgccgtcaacagccagcaggcaaaagtatgtcgcgtatggtacggattacggcggcgaataccagcacgttttactgctgcattccatctcgctcccaaatagtcgtagtgaaatctgatgggaaagccttgcttagcatgctggtgttgcgctacccgtacaggatgcggtaacacaggaagaaattagaacagaaactgtggcggacattgtgcattcgttgccaggcggagaaatagaacgctacaacaagtgcagaatataatttttcgcaagtgccagaatagcgatattatgcagtgttttttagttttctatcaggggatattttgtgaaacttttcggtgaataaaataattctctgtaataaatgatgggtatggttggtggttatatttgcgcatggaaatattacattggatatgaatgtatttcaaatgaaagaaccatgacacccgaatggagttagggattcattacgtatctaatctaaagaataagaaaaatacttaattcattgtgggtggtgatgatatcttgatatgtaaaaatggttctcttaataagatgtaactagcttattacttatccatagcacaagaaatggtcctgtatctgcgttgccatgaaataagataggcctaaatgtaataaagagttgcatgacaaaattactaaagttcacaataaaaaagaattaagttttttgttcaagtatttttttagtgtattgttttgaaatgttctacgctgctctaaccttcagtctgaagagggcttgaatcgtgatgtcagttcgattgacataatgttattaataatgtttacgtttgaatgtgaaatatgcttaactatgccttgattgttaatcacagggactgactatgagaaaaatactgatgtatttatgtattagcatatggattgttatatcatgcgtgcctatcatattaactagcgagtatttaacagaggcgagtataatggcattgatgtttggtcatgccaatgcactatgtattggggtttttatttctattatttatatagaatgctggaggtaaatagtgtgaacagcattagtttgatgattttatactgaactaaagggggaaagaggtaacgaaaaaagacctccaccaggtacgaatctgaggcgggcagatggaggtcgatatctacacgattaaattgataagtaaaagtcccatcagggattgatttgttcgagtctaatttaaagtaatttcaacgatttggcagaatttcttagagttaatgattttcaagttttcgattaccaggaaaaaggctgggtgctgataaaatagtcatctgcattccttaaattgtgtaagggtgaaaggataaagttcaatttaaaggcggtgcaatattagcaccatcttatatatgtaatgattgatttgcctctttattctactgttgagattattgtttccgaaaattgattattataagcgcgaaaagaaatgctacagcaaataagaggacgattgtcggcgctggggctctatcgagaaaatataataaccatacacctgatattgttattgatatcgttacggcgataagtaatgccttatgaaagcgatgcgtgatgaggacagcaatagaccctggagctattaatagtatatagacagaataatttcgactgcttttaatgtggcaaaaatggtaggcgataccatgcagagtaaaccgtaatgtaataatgatatctgtaatccgctgacttgtgcctgttgatagtcaagacaaaaattcctgaaaaaacgatacctataatggtatctttctttatgatgctattatctttcagatagccagttgcaattgcacaagacagtcctacaataaatgcaccaattcccagcggcatacctataatccaggctagaactatgccaggaaacattgcgtggttcattgcatctcctattagcgcccagccttttaataccaggaaaactgataataatgcacaggggaacgatattataatagcgattatcaatgcataattcataaatttaaattgtaatgattagaggggaaaatgtcagcacatttgcgaaatgaatcaaaaagcccgcagcaatgtgcgggcgttagtgtcagcgcacaaccagcacggagcactctgcgtgacgcactacagctgcggcgttagaaccgagcagataagtggtgatatccggtcgatgggaagcaatgatgatcatatgagcggggatcttcttcgccaattccagaatgcggtctttgggcgagccttcttcaacatggacatgcactctgtcggttggcagtttaaattttttaatgatctcttccagttgcgatttggcttccgctttcagatcatccattgccggtaattctgcggaataggctaaacccagagaggcatagtagggcagcgaaggtattaccgtcaggaaatgaacctctgcatcatcaatctttgcctctgcctcaacgtggctaatcacgcgttgagttaattctgaatcggaaatatcgatagggacaagaatcgttctgttcataaaacctcctgttttagtatccgcataaagtgtaacgccagatgacactttttgtgtaatgacggagttcacatttttaatttagatcaaaggaggaagaataagcagaaaaagcccgccaaaacagcgggcagggggatttagaactgataaaccagacctaaagcgacgatatcatcggtagagatgccgttggcagcgtagaaactgtcatcttcatccaacaggttgattttatagtcaacataggtggacatgtttttattgaaatagtaagtcgcgccaacatcggcgtatttaaccagatctttatcatcaacacctgccgggttgtctgcaccaccggcagcgtgcaggtcacggcctttagacatcaggaaagagactgccggacgcagaccaaaatcaaactggtactgtgcagtgacttcaaagttctgggttttgtttgcaacagcataatcgctgtcgccaaacggggtcatattacgcgtttctgaatacatggttgccaggtaaatattgttagcatcgtattttagcccagcagtccacgcgtctgctttatcaccacctgccgcagtatggttaacctggtcattggtgcggtcagaagaggtgtatgccgcaccagcgctaaagcccatgcctaaatcatatgttgtggaaagaccccagccgtcaccgttttcatggcgaacatcacgtccgttgttggtgccttcctgaccattactggcaccttcgttgttaccttgatactgcaccgcgaagttcagaccatttaccagaccgaagaaatcagtattacgataagtcgcgacgccattggcacgaccagtcataaagttgtctgcattggtataagagtcaccgccaaattcaggtagcatatcagtccagccttcgatgtcgtacattacgccataattacgtccgtaatcgaaagaaccgtaatctgcaaatttcagtccggcaaatgccagacgggtccatgactggtttgttgaagattcggtgttgtttgcctgaatattgtattcccattgaccgtagccagtgagttgatcgttaatttgggtttcgcctttaaaacccagacgagcatagctctggtcgccatctttcgctgaattatcagaaaaataatgcaggccatcaactttgccatacagatctaatttgttgccgtctttattataaacttcggctgcatgtgcagcacctgcagcgagcagggcaggaattaagagtgccagtactttgcttttcattgaataaatcctttagttattttatttgcctttcatccccattttggggagtgaaaacatcctaaaggagaagttcagttagccgataaatatcatttgttacgccttaagtaaaaccttaattaaataattcttcagaaatgataataagtctggtgaatgtattggagataacacatacaaaataaaaattatacttttaattttctatacgttattctgcgcgggttatatgcctttattgtcacagattttattttctgttgggccattgcattgctactgattttccaacacataagaagacaagcccgaacagtcgtccgggcttttttttagaattggatgatccttatccagagcatttaatcggtgttgcttttttccgcttttccggccatttgtgccaggaagtcatagcgtttttgcaaatcagctgcagcatctttccataactgttctgccacttctggctgctgcgaattcagacgacggaaacgctgctcgtgaagtaacgtttcttccagtgcttctgacggcgggcgtgaatccagcgccagcggtagtttgccttcatcggcacgacgaggatcgaagcgatataacggccagaagccggtagcagtgagttggcgcatctgatcgtggctgagtgccagatcgtaaccatgctcttcacatgggctataagcgatgatcagcgatggccccggatacgcttccgcttcctgaatcgctttcaccgtctggttcagctgcgcgccgagagaaatctgcgccacataaacatgaccgtacatcatcatactgacgccaagatctttacgcgctttacgtttgccatgctcgccaaacttagttactgcacccagcggtgtcgctttcgatgcctgaccaccggtgttggaatagcattgcgtatccagcaccagaatgttgacgttttccgtcaaactcaatacatgatccagaccgccaaagccgatatcgtaagcccagccatcgccaccaatcagccagattgatttttccaccagtgcatctgcgtcacgcagcagttcatgtgcttcggcaacatcgttgagttgctggcgtaaagctgcaacctgttcacgacgaacctctggcgtggcgtctgatttcaacgcagtcagtaattccgccgggattttatcggcaaattgatcgagcagacgcagcacgcggacacggtgttgatcgaccgtcaggcggaaaccaaggccaaattcggcgttatcttcaaacagcgagttcgcccatgccggtccacgaccgttggcatcggtggtatatggtgttgaaggcaggttaccgccgtatattgaagaacagccagtggcattagcgatcaacatccggtcgccatagagctgagtcagcaatttaatatacggcgtctcgccacaaccggagcaagcacctgaatattcaaacagcggtgtaatcagctgcgatgtacgaatatcaatacgttccagtttgctacggtcgatttctggcaggttgaggaagaaatcgtaattgattttctcttcttcgacatgttccaggcgcgacatcatattgatggctttaatctctggattctgacggtctttcgccgggcaaacttcgacgcacaggttacaaccggtgcaatcttccggagccacctgcaagacatatttctgcccgcgcatatcacgcgatttcacatccagcgaatgcaggctggcaggggcgttttccatcgcttcaggcggtaccacttttgcgcgaatagctgagtgtgggcaagcggcgacacagtggttacattgggtacagagttcctctttccagatggggatctcttcggcgatattgcgtttttcccagcgcgtggtgcccatcggccaggtgccgtctggcggcagcgccgaaacggggagggcgtcgccaagcccggcgagtatcgcagcggttacggttttcacgaaatcaggagcggcatcggaaaccaccggcggtcgattggcgctatgcggattaactggctgcagtggaacttcttctacggattcacgtgccagcgccagagcctgccagttgcgttccaccagatcctggcctttgctactgtaacttttggcaatcgcaccctgcaattctgcgagggcactatcgccaggcagaatctgcgtcagatggaaaaaagccatctgcatgacggtattaatacgggccgccaggccacattcgcgggcgattttcgccgcgttaatcacatagaagcgcgcttttttctggtttagcacggcctgaacttcctgcggcaagcgcgaccacacttcagctgcgctgtacggcgtgttgagcaggaaaatgccgccaggttttaaacgctcagccatctgatatttatcgataaactgcaactggtggcagccaacaaaatcagcctgggaaatgagataagcggaacgaatcggctgttcgctcacgcgaaggtgagaaaccgtcaggccgcccgcctttttggagtcgtaaacaaaatagccctgtgcgtaccacggcgtggaatttccgataatcttgatattgtttttggtcgcggaaacgctgccatcactaccaaggccataaaacaaggcttccagtttcgccgagtttggtagggtgttttccggcaacggcagtgacagattggttacatcatcgtaaataccaaccgtaaagcgcgctttcggtttagccgcgttgagctcggcaaataccgccagtacacagtccgggccaaattctttggatgaaagaccatagcgcccaccaatgacacggggcagggtttcgcgctcgccattattaaaggcttctgccagtgcggtcatcacatccaggtacaggggttccgcttgcgcacctggctctttggtgcgatccagcaccgccactatccgaacagagtccggcaatgcttgcagcaagtgtttggcggagaaggggcggtacaggcgaactttcagcacgccgactttttcgccacgggtcagcaattcaccaaccacttcttcacatgtgccaatggctgagcccatcaggataatcacccgttccgcttgcggatgcccgtaatactcaaacggctgatactgacgacctgtcgcggcagcgaaatcattcatcgcctgttcaacatggtcatagactgcgttgtaccatgggttggtggcttcgcgagactggaaataagtgtcaggattggcggacgtaccgcggatcaccggatgttccgggttgagtgcccgggcgcgatgagcatcaatttctgcctgcggcatcagttcaagaatcgtgtcatcggccagcgggacaattttattgatttcgtgagatgtgcggaaaccatcaaagaaatgaataaatggcacgcggcttttcagcgtcgcgatgtgcgaaatgagagcaaagtcttgcgcttcctggacgcttgctgcacacaacatcgcgcaacccgtctggcgcaccgccataacgtcggaatgatcgccaaaaatagagagtgcatgtgtggcaacggtacgtgccgcaacatgcaggacaaacggcgtcagttcgcctgccagtttgtacagcgttgggatcatcagcagcaaaccctgcgatgacgtaaacgatgttgagagggcaccagtttgcaaagcaccatgcacggtagcgatagcacccgcttccgactgcatttcaaccacgcgtggtgtgtctccccaaacgtttttcaagccgtttccggcccatgcatcagcctgttctgccatcgtggaactgggggtaatagggtagatggcgataacttcactggtgcgaaacgccaccgaagcaaccgcgccattaccgtcaatagtaatcatatgacacccttacattgcgcaaatgaggggcgcacgaaattgctgcgcgcccagtagtaatcgttcaattttagcaaatggctttcttctgcattttcgcttttgtgtcccccacatcagcgtaatgaatgttttgatcaaacagagggcaaaaaaatagccataaaaaagtaaaaatgcggggcaacgcgcaggacagctctcgacgccgccctctgtgctgcctattatttatggcggtgtcgtttggcttgaagatcagaggaagaaaagatgcgagcagcgttttgggtagggtgtgccgctttattgttgtcggcgtgtagtagtgaacctgttcagcaggcgactgcggcgcacgtagcgccaggtttaaaagcgtcgatgtccagtagtggagaagcaaattgtgcaatgatcggcggttcgctttctgttgcccgccaactggatggtacggcgattgggatgtgtgcattacccaacggcaaacgctgtagcgaacagtcacttgccgccgggagctgtggcagctattaattcattaaatccgccagcttataagttaatgtctgtttcgcggtcgccagcgttaactggttcgcggtcagatccacttgtgcaccttctttcagcatttcgctaatggtgttatcgagttcattaagctgcgggttagcgcacatcatacgggtcattgccagccctttggcggtcagttcaccattagacagtttgccttcaccgctaaagcggttacacatgctgccggaaatcatcatcttttcaccaaagctgatttctggcggatttttatcgctggtcacgggcttaccgtttacgctttccagcacaaagcgatgatgctgtagctgttctggcgttacagcaattttgtcactacttacacatcccgccatcagcaggcttagcgcaacaagcgcggctactttcttcattgtggttctcaattactgtttctgattcaggactattttaagaatagaggatgaaaggtctttggggattatctgaataagctcccctggaatgcaggggagcggcaagattaaaccagttcgttcgggcaggtttcgcctttttccagattgcttaagttttgcagcgtagtctgagaaatactggtcagagcttctgctgtcaggaatgcctggtgcccggtaaacaacacgttgtggcaggcagacaagcgacggaatacgtcatcctggatcacgtcgttggatttatcttcaaagaacagatcgcgttcgttctcatacacgtccatacccaacgaaccaattttctgatttttcagcgcttcaattgccgcctgagaatcaatcaatgcaccgcgactggtattgacgatcatcacgccatttttcatctgatcgaaggcggcttcgttcaacagatggtagttttccggtgtcagcgggcagtgcagagagataacgtctgattcagagaacagggttggcagatcgacatactccacaccgagttccagcgccgccgcacttggatacggatcgaacgccagcagacgcataccaaaacctttcagaatgcgcagcattgccacaccgattttaccggtaccgataacgcctgccgttttgccatacatagtaaagccggtcagaccttccagagagaagttagcgtcacgggtacgctgatatgcgcggtgaatacggcggttcagcgtcatcatcataccgatggcgtgttcagcaacggcctctggatcataggctggaacacggactactttgagccccagttcttttgccgcgtcaaggtcgacgttattgaaaccggcacagcgcaaggcgatatatttaacgccgtgctttttcagctcttccagcaccgggcggctgccgtcatcgtttacgaaaatacataccgcttcgcagccattggcagttttagcggttttttccgtcagcagaaagtcaaaaaattccagctcaaagccaaaggactcgttcacctgttgcaggtacttcttgtcgtactgttttgtgctataaacggcgagtttcataagactttctccagtgatgttgaatcacatttaagctactaaaaatattttacaaaatttcaaatataattgaaagatatggcgatattgaaaaattcatcaacaactatgcttagtgtaggcgcaaccttcaactgaacggttaaacatgccacaatacccgtattgaatgcttaatttttcgctaaatcaggatattgactacccatgctgggtaaatataaagccgttctcgcgctgttattactgattattcttgtgccgttgacgctgctgatgacgctagggctgtgggttcccacgctggcgggcatctggctaccgctcgggacacgtattgcattagatgaaagcccacgcattacgcgtaaaggtttaatcatccccgatctccgttatctggtgggagattgtcagcttgcgcatatcaccaacgccagcctttcacatcccagccgctggttattgaacgtcggcacggtagaacttgattctgcttgtctggcgaaattgccgcagacggagcaatcgccagccgctccaaaaaccctcgcgcagtggcagtccatgctgcctaacacctggatcaatatcgataaactgattttttctccctggcaggaatggcagggaaaactctctctcgcattaacctccgatatccagcaactgcgttatcagggcgaaaaagttaaatttcaaggccagctgaaagggcaacaacttacagtcagcgaactggatgtcgccgcgtttgaaaatcagccgccggtaaaactggtgggggaatttactatgccgctcgtgccggatggacttccggtaagtggtcatgctactgcgacgttaaacttaccgcaggagccttcactggtggatgccgagctggactggcaggaaaatagcgggcaattgattgtgctggcacgggataacggcgatccgttgctcgatttgccgtggcaaattactcgtcaacaattgaccgtaagcgatggtcgctggagctggccgtatgcaggttttcctttaagtggccgactgggtgtcaaagtcgacaactggcaggcagggctcgagaacgctctggtcagcgggcgactgagtgtgctgacccagggacaagcgggtaaaggcaacgcggtgttaaattttggcccaggaaaattaagcatggataacagccagctgtctctgcagctgaccggtgaagcgaaacaggcggacctcattttatatgcccgtttacctgcgcagctaagcggaagtctgtctgacccaacgctgacctttgagccaggcgcgttattacgttcgaagggaagagtcattgattcgctggacatcgatgaaatccgctggcctttagcgggtgtaaaagtcacccaacgtggtgttgacggacgtttgcaggccattttgcaggcgcatgaaaatgaactgggcgatttcgtgctacatatggatgggctggcgaatgattttctccctgacgctggccgctggcagtggcgctactggggaaaagggagttttacaccgatgaatgccacctgggatgtcgcaggaaaaggtgagtggcatgacagcacgattacgctgaccgatctctccaccggtttcgaccagttacaatacggtacgatgacggtagaaaagccgcgattaattctcgacaagcccgtcgtctggggacgtgacgcacagcatccctcattcagcggcgcgctgtcactggacgccgggcaaacgctgttcactggcggcagtgtgttaccgccatcaaccttaaaatttagtgtcgatgggcgtgatccgacgtatttcctctttaaaggcgatttacatgctggtgagattggcccggttcgggtaaatggtcgctgggacggtattcgtctgcgcggtaacgcctggtggcctaaacaatcactgactgtattccagccgctggtgccacccgactggaagatgaacttacgcgatggtgaactgtatgctcaggttgcattttcagctgcgcctgaacaaggattccgcgcgggagggcacggcgtgttgaagggtggtagtgcctggatgccagataatcaggttaacggtgtcgattttgtcctgcctttccgttttgccgatggagcctggcatctggggactcgcggtcccgttacgttgcgaattgccgaagtgattaatctggtgacagcgaaaaatattacggctgatttgcaaggtcgttatccgtggactgaagaagaaccattgctgttgactgatgttagcgttgatgtgttaggcggtaacgtgctgatgaaacaattacgtatgccgcaacatgacccggcgctgttgcggctgaataatctttcctccagcgaactggttagcgccgtcaatccgaaacaattcgccatgtccggggcatttagtggtgcattgccgttatggctaaacaacgaaaaatggatagtgaaagacggctggctggcaaatagcgggccaatgaccttgcggctggataaagacaccgcagatgcggtggtgaaagacaatatgaccgcgggttcagcaattaactggttgcgctatatggaaattagccgttcatcgacaaaaattaatttagataatctcggtttattaaccatgcaggccaatattacaggtaccagtcgcgttgatggtaaaagcggtacggtaaatcttaattaccatcatgaagagaatatttttacgctgtggcgcagtttacgctttggcgataatctccaggcatggctggagcagaacgcgcgtctaccgggaaatgactgttcgcaaggaaaagagtgtgaggataaacaatgaaaattttactggctgcgttgacgtcatcttttatgctggttggctgtacgcctcgcattgaagtcgctgcacctaaggaaccgatcactatcaatatgaacgttaaaattgagcatgagatcatcatcaaggcagacaaagatgtcgaagagctgcttgagacccgtagcgatcttttttgaggtgatgatgaaaagaacattacttctttgtgcatttcttgttggcttggtaagcagcaatgtaatggcattgactctggatgaagccagaactcaggggcgggtaggggaaacattttatggttatctggttgcgctgaaaacagatgctgaaactgagaaattagtaaccgacatcaatgccgaacgtaaagcgagctatcaacaactggcaaagcaaaataatgtgtcggtggatgatatcgcgaaactcgccgggcaaaagctcgtagaacgggccaaacccggggaatatgtacaagggataaacggtaaatgggtgcgaaaattttaatagcaaaaccgcaatatcgggataacgctacaggagaagacgtttaatctattttccggaaacattttgctcttttaattataaggatgagttatgtttcggctctaatttatttattcgagtattgatttataccgttttttcattaaataaatatctatgtgacgcatttgaatttataatttatataatatacataatttgtatgtttcgcgggtttatttatttctctgtattataaatccagattgtcagagaatatgtttgattaggtaacaatctactggcaatattggacgtcctctatgttttaaataatcaattggtcgggtcagggtatccgaccttctttatattcgccagaaggatttattatgcaaaggaaaactctattgtcggcctgtattgcattagctctgagtggtcagggttgggcggcagatattacagaaatagaaaccaccacaggtgaaaagaaaaataccaatgtgacttgtccagcagatcctggaaaactcagtccagaagagcttaaacgcttaccctctgaatgctcctctgtagtcgaacagaacctgatgccatggcttgtcacaggtgctgctactgcgttaatcacaaccttagccatagtggaactaaacgacgatgatgatcatcatcgcaataattctccacttccaccaactccacctgatgatgattcagacgacactccagttcctccaactcctggcggagatgagataataccagacgatggtccggatgataccccgacgcctcccaaaccgatttcgtttaataatgacgttatcctcgataaaacagaaaaaacgttaactattcgcgattcagtttttacttataccgagaatgctgacgggactatttctctgcaagatagcaatgggcgtaaggcgactattaatctttggcagattgatgaaacgaataacacggttgcccttgaagggatgagcgcagatggtgcaacgaagtggcaatataatcacaacggtgagctcgttattacgggcgacaataccacagtaaacaacactggaaaaaccatcgtcgacggcaaaggcgccaccggaactgaaatcgcgggtaataacgcggtggtgaaccaggacggcgagctggatgtgagcggcggcggtcacggtattgatatcaccggcgacagcgcgacggtggacaacaaaggcggcatgactgtcaccgatccggattccatcggtattcagatcgacggcgacaaggcggttgtcaataacgacggtgacagtgccatcagtaacggtggcaccggtacgcaggttaacggtgatgaagccaccgtgaacaataacggtaaaaccaccgttgacggcaaggattccacgggcaccgagataaacggtgacaaagccatcgtcaacaacgacggtgacagcacgatccttgatggcggcaccggaacccgcattacgggtgatgatgcgacggccaacaacagcggcaataccaccgttgatggtcagggttcgaccggaactgaaatcgcgggtaacaacgcggtggtgaaccaggacggcgagctggatgtgagcggcggcggtcacggtattgatatcaccggcgacagtgcaacggtggataacaaaggcggtatgaccgtcgcggatgcggattcgattggcattcagatagacggcgacaaggcggtcgtgaacaacgacggtgacaatgccatcagcaacggcggcaccggcacgcaggttaacggcgacgaagccaccgtgaacaataacggcagcaccaccgttgacggcaaggattccacgggcaccgagataaacggtgacaaagccatcgtcaacaacgacggtgacagcacgatccttgatggcggcaccggaacccgcattacgggtgatgatgcgacggccaacaacagcggcaataccaccgttgatggtcagggttcgaccggaactgaaatcgcgggtaacaacgcggtggtgaaccaggacggcgagctggatgtgagcggcggcggtcacggtattgatatcaccggcgacagcgcaacggtggataacaaaggcggtatgaccgtcaccgatccggactccatcggtattcagatcgacggcgacaaagcggttgtcaataacgacggtgacagtgccatcagtaacggcggcaccggcacgcagattaacggtgatgaagccaccgtaaacaataacggcaataccaccgtagacggtcagggttcgaccggaactgaaatcgcgggtaataacgcggtggtgaatcaggacggcgagctggatgtgagcggcggcggtcacggtattgatatcaccggcgacagcgcgacggtggacaacaaaggtggaatgactgtcaccgatcctgactccatcggtattcagatcgacggcgacaaggcggtcgtgaacaacgacggtgacaacgccatcagcaacggcggcgccggcacgcaggttaatggcaacgaagccaccgtgaacaataacggcaacaccaccgttgacggtaaggattccacgggcaccgagataaacggtgacaaagccatcgtcaacaacgacggtgacagcacgatccttgatggcggcaccggaacccgcattacgggtgatgatgcgacggccaacaacagcggcaataccaccgttgatggtcagggttcgaccggaactgaaatcgcgggtaacaacgcggtggtgaaccaggacggcgagctggatgtgagcggcggcggtcacggtattgatatcaccggcgacagtgcaacggtggataacaaaggcggtatgaccgtcgcggatgcggattcgattggcattcagatagacggcgacaaggcggtcgtgaacaacgacggtgacaatgccatcagcaacggcggcaccggcacgcaggttaacggcgacgaagccaccgtgaacaataacggcaacaccaccgttgacggcaaggattccacgggcaccgagataaacggtgacaaagccatcgtcaacaacgacggtgacagcacgatccttgatggcggcaccggaacccgcattacgggtgatgatgcgacggccaacaacagcggcaataccaccgttgatggtcagggttcgaccggaactgaaatcgcgggtaacaacgcggtggtgaaccaggacggcgagctggatgtgagcggcggcggtcacgggattgatatcaccggcgacagtgcaacggtggataacaaaggcggtatgaccgtcgcggatgcggattcgattggcattcagatcgacggcgacaaggcggtcgtgaacaacgacggtgacaatgccatcagcaacggcggcaccggcacgcaggttaacggcgacgaagccaccgtgaacaataacggcagcaccaccgttgacggcaaggattccacgggtaccgagataaacggtgacaaagccatcgtcaacaacgacggtgacagcacgatccttgatggcggcaccggaacccgcattacgggtgatgatgcgacggccaacaacagtggcaataccaccgtagacggtcagggttcgaccggaactgaaatcgcgggtaataacgcggtggtgaatcaggacggcgagctggatgtgagcggcggcggtcacgggattgatatcaccggcgacagcgcgacggtggacaacaaaggcggcatgactgtcaccgatccggattccatcggtattcagatcgacggcgacaaggcggtcgtgaacaacgacggtgacagtgccatcagcaacggcggcaccggcacgcaggttaacggcgacgaagccaccgtaaacaataacggtaaaaccaccgttgatggtcagggctcgaccggaactgaaatcgcgggtaataacgcggtggtgaaccaggacggcgagctggatgtcagcggcggtggtcacggggttgatatcaccggcgacagcgcaacggtggataacaaaggcggtatgaccgttaccgatccggattccatcggtattcagatcgacggcgacaaggcggtcgtgaacaacgacggtgacagtgccatcagcaacggcggcaccggcacgcaggttaacggtgatgaagccaccgtgaacaataacggtaaaaccaccgttgatggtcagggctcgatcggtaccgaaatcgcgggtaataacgcggtggtgaatcaggacggtacactggatgtcagcggcggcggtcacgggattgatatcaccggcgacagcgcgacggtggacaacaaaggcggcatgactgtcaccgatccggattccatcggtattcagatcgacggcgacaaggcggttgtcaataacgacggtgacagtgccatcagtaacggcggcaccggcacgcagattaacggtgatgaagccaccgtaaacaataacggcagcaccaccgttgacggaaaagattccacaggcactgagattaacggtgacaaagccatcgtcaacaacgacggtgacagcacgatccttgatggcggcaccggaacccgcattacgggtgatgatgcgacggccaacaacagtggcaataccaccgttgacggacagggttcgaccggaactgaaatcgcgggtaacaacgcggtggtgaaccaggacggcgagctggatgtgagcggcggcggtcacggcattgatatcactggtgatagcgccactgtaatcaacaaaggcaatataactgtcacggataaagattcggttggtgtactgattaatggtgatcgagcgacctttgccaatacgggtcatattgacgtcaataattcagctactgggtttagcatcgcaaccagtgagggagttatctcattaactggcagtatggatgtaggtgacatctcaacaggaatggtgctcagcggagatggcaacagcgtgacgctggcagtagaagatcttaatgttactgggcagaaagcgatgggtgtcgacatttctggtgatagtaacgacattgatatcgctggcaatatcttggttgataaagatcaaactgcagataatgcggcagactatttcttcgagtcatctgtcggggtgaatgtcacgggtaacaataatacagtatctctaaatggcgaattaacagttgtctctgacagcgaattaacctcaagatctcatggcaagcgtgatgggagtcaagaaaatatctccgggctgattgtgtctggtgataataatacaataagcctaaatggcggtatacagtttatcggtgagcaaaaaatactggcggatggttcagatattgcatctctgcgtaaaggacttagtgatacctccataatcagcgttgatgggaactcatcagtatatttgaatgggacttcgacaataggtggcgaccttcctttaggctatacaagcattattcagttaaaaaataaagctatcctggaaattggtcgtgatgctttgttgggtgtaaaggatattaaatcgtttaataactattacgagccagtaccgaagattataaaggctactacaggttctaaggtcatcaataatggcaatatagatatccaaaatatcggttttatttcagtgtcaggtgaagatacgtcgggcactaataatggcaacattacgctatcacagtacgattacggcaacatgatgtcaggtactaatgctctgttaagtaccgatggaggcagtgttgttaacaacggcaccatcatcgggaaggtcatggagcaaagtagcgttattaatcgatttgagacgaccgacgttacttatgatgagttgtttaataatagcgttacgggcataaccggaatgctttctaaaaccggtgctatgggcattaataatgtaaacggcattattgatatgtatggacgcggtagcgtgggtatgttggcggttactcaagcgattatagaaaatgctggcaccatcaaactggactctctatgggttgatgctaacgataccactgcgttacccgataatatcgctatcagtaatgcccgttattatggtgcagggatggcggtaggttcagatagctatggtagcccggatgcaaatgtcacagctattaaccaattaggtggtgtgattagtgtctataatgctggggtcggtatggccgcttacggcggtagtaatatggttattaaccaaggtacgattaacctggagaaaaatgaaaactatagcagtagtctgagtgcaaatacgctagttggtatggcggtttatcaacacggcactgctattaacgataaaactggcgtgattaatattaatgtcgataccggccaggcgttttataacgacggtacagggacaatcctgaattatggtgagataaaccttctcggttctccaatggacagtgcagatccccatatgggggctaccccagataatctggatctgctgtcagcactaacaggcagcggcgaaacggatatgcgaactgcttcaagtggtgggtttgtgacgaccaaagcgctggcaaactacggcaatgaaacgctaaatagtaatgtgaccgccaaagcgtggctttataaccaggataaggccaatctgacaattaacggagagctatccgttgggcaagggctggaaaatagcggattactggattctgacaccattagtgcagcagcgaatgtctataaccgtgcatcgggtagcattattaccgacctgttaatgttaacgagtggtaactcgttttttaacgagggtaatttcagcggatctatagttggcaacagctataggcaaaatgtggttaataccggaagtatgacagtcacggctgatggtacatcgctcatcggcggcagctttgtgctttataacgaagcgggggcaatactcagcaacagcaacagcgccgtttcgggtggagaaaatgccattgttaacataacccgcaccagcgattcactcgcgcaagttaaccgcggcactattaccgcgaccaacggctacagtgcgattaaaacggcaagtacgggttctaacagcaacggaaaatggatctggaataccgatacgggtgtaattagcggcgtgagtcctaatgcactgttaattgatcttggtcgcggctataactttgccaacgcaggcactattaatgtgcagggtgatggtgcagtcgctatcagcgggggaaccaccagctatacggttcaactggtgaacagtgggaccatcaatgtcggtacggcgcagggtaaagcggacggcactaacggtactggtttaattggtatcaaggggaatggccgtgagacgacaattaataacgcacaaagcggtgtaattaacgtttacgcagataactcctgggctttcggaggacagactaaaacgatcatcaataatggtgaaatcaacctgctgtgtgatatgggatgtgatatttatgcaccgggcaccaccggtacactgaacgatcataacagtactactgatattattgttcctgccgcaacgagcacacctacgcaggggtcagtacccacagtacctgcggactccagtgcacagcaaaaactgactaactacactattggtaccaatagcgatggcacctctggtatgttgaaagccaataaccttgtcatcagcgacaacgtcaaggtaaataccggattcagtgcaggtactgccgacacgactgttgtgattaatgatgttttcaaaggtgaaaatatttccggggctgagaatatttcttcttccacggtaatgtggaatgctcagggcagcactgatgcaagcggcaacgtagacgtcacgatgaccaaaaacgcctatacggatgttgtgacggattcttcagttaataatgtcgctcaggtactggatacgggttacaccaataacgacctgtacactagtctgaacgtaggaacgactgctgaactgaacagtgcgctgaaacaaattagcggcagccaggcaaccacggtattcaatgaagcacgagtgttaagtaaccgtttcagcatgctgtcagatgctgcaccggaagttgcaaacggtctggccttcaacgtggtagcgaaaggcgacccgcgtgctgaactgggaaataatacacagtacgacatgatggcgctgcgtaaatccatgacactgactgaatatcagaatctgagtctggaatacggtattgcgcgtctggatggtaatggttcagataccgcaggcgataatggtgtgactggcggttacagccagttcttcggtctgaaacaccagatggcgtttgacaacggtatgagctggaataacgccctgcgttatgatgtgcataatctcgatagcagtcgctcgatagcttacggcgacgtcaataaaaccgctgatgctaatgtgaaacagcagtatctggaattccgtagtgaaggggcaaaaacctttgaactgcgtgaaggtctgaatgtgacaccttatgcgggtgtgaaactgcgtcacacactggaaggtggctatcaggaacgcaatgcgggtgactttaacctgagcatgaacagcggcagcgaaacggcggtggacagcatcgttgggctgaaactggactatgcagggaaagaaggctggagtgcgaacgccacgctggaaggtgggccgaatctgagctatgtgaaaagtcagcgaactgcgagcatttcgggcgcgggaagccagcgtttcaacattgatgatggtcagaatggtggtggtttcaacagcctggcgacaatgggtgtgaaatacagcagccaggaaagtgcgttgcaggtagatgcattccactggaaagaagacggcatcagcgataaaggtgtgatgctaaacttcaagaaaacattctaatttttagcatgtaatacataaaccgcaacgctgatacaggttgcggttttttattgccggatgcggtgcttgacgtgtcttaacctgcctggggtttcgtgtctttcaggacaacagtacaactcatcccgcaatcttgtttacaccctcgcattatttatctctattcatttctatactgatttttcttaatccgttgtattacagggcagggtgcgatgagcagcaacacatttactctcggtacaaaatccgttaaccgtcttggttatggcgcgatgcaactggctggtcctggggtttttggccccccaagagatcgccacgtcgctataaccgtgctgcgtgaggcgctggcattgggcgtcaatcatattgataccagcgacttttatggtccgcacgtcaccaatcagattatccgcgaagcgctttatccgtactctgacgacctgacaattgtcactaaaattggtgcgcggcgtggagaggacgcatcctggttacccgcattttctccggcagagctgcaaaaagcggtacacgataatctacgtaatctcggcctggacgtactggatgtggttaacctgcgcgttatgatgggggatggtcatggcccagcggaaggatcgattgaggccagcctgacagtgctggcggagatgcaacaacaaggcctggtaaaacatattggcctgagtaacgtcacaccgacgcaggttgcagaggcgcgaaagattgccgaaatcgtctgcgtgcagaacgaatacaacattgcccaccgtgctgatgacgcaatgattgatgctttggctcgtgatggcattgcctacgtgccattctttccgctcgggggctttacgccgctgcaatcctccacgctttccgatgttgctacaagccttaatgcgacaccaatgcaggtggcgctggcgtggctgttacaacgttcaccgaatattttgttgattcctggaacatcttctgttgcgcatttacgggagaatatggctgctgaaaaatttcatctttctgagaaagtgttgtctacgttggatggtatttcgcgagaataacgaatatacaaaagggaaagatgcatttcccttttgtttcttttttaatggcatggagtgcatatgtttaaggccaggatttgcggctggataatcagggaaaaggcgatggattcattgattcgtacagtgatagatggtatctcactgatatccagacggtaatcaaacagatgtgtagggcattcatccaccacatcttgatatattccgaatttacgttgatgctgcgcgttgtgatatctccgccgtcggaattgatgcaccatagagtaaactgaatatcacggaatgataaatgacgctctaccagataaaaccgctctttcagtcgctgttaaggccgacgatgttttggctttataagcaccatgttacagcgaatcacatcactcttgctgcactggcgctttctcttcttaccggattgctgttggtgttggtggcacaacccatcctctttttgctattgcccatcgtgctttttatccgtatgacgctcaatgcgctggatggcatgttggcgcgtgagtgcaatcagaaaacacgtctgggggcgattttgaatgaaactggcgatgttatttccgatattgcgctctatttaccgtttttatttttaccggaaagtaacgcatcactcgtaatactcatgttattttgcaccatattgaccgagttttgcggtttactcgcgcagacgattaacggtattcgtagttatgtcggtccatttggcaaaagcgatcgcgcgttaatatttggtctgtgggggctggccattgccatttatccacaatggatgcaatggaataatcttttatggagcattgcttcaattctgcttctctggactgcgattaatcgttgtcgaagtgtgctcctgatgagcgctgaaagataatgctggaaaaatctctggcaatactcttcgcgttgttaattttagcaacgctgataaaccgttttctggtatggcggttaccggagagaaaaggcgatgaagtaacattacgtattcgtacctggtggggcatcgtcatttgtttttcactggtgatttcaggtccacgctggatgacgttgacgttttttgcgctgataagttttctggcattgaaagaatattgtacgcttatatccgtacattttccgcgttggttatattgggttattcctcttaactatttgcttatcggttttaattgctttgagctgtttctgttatttatacctttggctgggtttctgatattagccacctggcgagtttttgtaggtgacccctctggttttctgcataccgtgagtgccattttttgtggctggataatgaccgttttcaccttgagtcatgccgcctggttattaatgttgccaaccataaatatccagggcggggcgttactggtgttatttcttttggcgttaaccgagtcaaacgatattgcacagtatttatggggaaaatcctgcggcagaagaaaagtggtccccaaagtcagcccgggaaaaacgctggaaggtctggtgggaggagtaatcaccaccatgattgcgtcactgattattggaccgttactgacaccgctaaatacattacaggtattattagcgggtttgttaattggtattagtggtttttgcggcgatgtagtgatgtcagccaccaaacgagatgttggtgttaaagatagcggaaaactattaccaggacatggcggactccttgacaggattgactcattaattttcaccgctccggtatttttttattttattcgctactgctgttactgaaggaaaacagagaaaatggaaaattcacgcatccctggggagcatttttttaccaccagtgataatacagcgttgttttatcggcactggcccactttactgccaggggcgaaaaaggtcatcgtcttatttcatcgcggtcatgaacattctggtcgtctacaacatatcgttgatgaactggcgatgccagatactgctttttatgcatgggatgcccgagggcatggacaaacttcggggccgcgtggttatagtccgtctcttgcgcgttcagtgcaggatgttgatgaatttgtccgttttgctgccagcgacagccaggtcggactggaagaggtggttgtgatcgcgcaaagcgtcggcgcagtgatggttgccacatgggttcatgattatgcgcctgctattcgcggactagtgctggcatctccggcctttaaggttaaattgtatgtgccgctggcacgtcctgggctggcgttatggcatcgtctgcgtggtctgttttttattaattcctatgtgaaagggcgttatctgacccacgatcggcaacgggtggcgagtttcaataatgatccgctgatcacacgggcgattgccgtcaatatcttgctcgatctctataaaacgtctgaacgtattgttagcgatgcggcggcgattacgctccccacgcaacttctgatatcaggcgatgactatgtggtgcatcgccaaccgcagattgatttttatcagcgtttacgtagtcctctgaaagagctgcatctgctgccaggcttttatcacgacacgttgggtgaagagaacagggcgcaggcatttgaaaaaatgcaaagctttatcagccgtttatatgctaacaagtcgcaaaaatttgattatcagcatgaagaccgcacaggaccatcagcggatcgatggcggctcctttctggtggacccgtgccgttatcgccggttgatttggcgtatcgctttatgcgaaaggcgatgaaactgttcggggcgcactctgcgggcctgcatctcggaatgagtaccggctttgattcaggcagttcgctggattatgtctatcaaaatcaaccgcaaggcagtaacgcattcgggcgctttatcgacaaaatctacctgaacagtgttggctggcgcggtattcgccagcgcaaaacccatttacaaatgctgattaaacaagccgttgcccatctccacgccaaaggtttagccgtccgcgtggttgacattgccgcagggcatgggcgctatgtactggatgcgctggcaaacgagcccgccataagcgaaattttgttacgtgattacagtgaggtaaatgttgcacaagggcaagagatgattgcccaacggggaatgtctgggcgggtgcgttttgaacagggcgatgcgtttaacccggaggaactcagcgcgttaactccgcggcctacgctggcgattgtctctggcctgtatgagcttttccccgaaaatgagcaggtaaaaaactcactcgcaggtcttgccaatgccatcgatccgggtggcattctcatctacaccgggcagccgtggcacccacaactggagctgattgccggggtgttaaccagtcataaagatggtaaaccgtgggtaatgcgcgtgcgttcgcaaggggagatggattcgctcgtgcatgatgccggattcgataaatgcacacaacggattgatgtgtggggcatttttacggtttcgatggcggtgcgtcgtgataactgaacgccggaacgtattgctacaaggagctggctggttattgttgctggccccgtttttcttctttacatatggatttcttaatcagttcaccgcgactcaggatcttaacaaccatgatatccccagtcaggtattcggttgggaaacggcgatcccttttcttccctggactattgttccttactggagtctggatcttttatatggattttcgctgttcatttgtagctcgacattcgaacagcgccgactggttcaccggcttattctggcaacggtaatggcctgctgcggtttttttctctatccgctgaagtttagttttatccgtcctgaagtgagtggggtgacaggatggctattttcgcaacttgaactgtttgatctgccttataaccagtctccttcgctgcatattattctctgctggctactttggcgtcactttcgtcagcatctggctgtgaggtggcgtaaagtctgcggcggatggtttttactcatcgccatttcgacgctgacgacctggcagcatcattttattgatgtcatcacggggctggcggtaggtatgttaattgactggatggtgcccgtcgaccgtcgttggaattatcagaaacctgatcaacgtcgaatcaaaatagcactgccatatgtcgcaggcgcgtgctcgtgcattgtgttgatggagctaatgataatgcttcagttatggtggtcagtctggttatgttggccagtattatcgctattcatcattggccgtgggtacggtgggcttggcgcgataacaacagggaaagatagtcaggggaaactcccgcccgccgtttactggctgacattgccctggcgtatcgggatgtggctgtctatgcgttggttttgtcttcgcctggagccggtgagcaaaattactgctggtgtttatttaggggcgtttccacgacatattccggcacagaatgcggttctggacgtcacctttgaattccctcgcggacgagcgacaaaagatcgactctatttttgtgtaccgatgttggatctggtggttccggaagagggggagctccgacaggccgtggcgatgctggaaacattacgcgaagagcaaggcagcgttctggtccattgcgcgttgggattatcgcgcagtgcgctggtggtggcggcatggctgttatgttacggacattgtaaaaccgttgatgaagtgattagttatattcgagccagacgctcgcggattgtgcttaaggaagagcacaaagcgatgctgaaattatgggaaaacaggtaagcggattgagatgtggactgaatatctacagtccacatcaagatcgtgtccggttattcagcaacaatactgtcgatggctgctttcgcgtcagactgtgctttcgctgccatttccgggccgtacgcgatcccttcggcgaagacaaatttcacatcggtaatgccgataaagcccaggaatgtggacagatatggcgttaccagatccgttgggccatctttatggatcccaccgcggctggtgataacgatggcttttttaccggtgaccaggccttccggacccttctcggtatagcggaaagtaacgcctgcgcgtgcaaccaggtcaaaatagtttttcaactgagtcgagatgttgaagttatacatcggtgccgcaataacgataacgtcgtgggctttcagctcggcaatcagctcatcggaaagcgccagagcttcctgctgacgcggagtcagcggcgcatcgctcggacgcagtgcaccaaccagttcgccatccaggaccggaatcggatttgtagccaggtcacgcacggtgatttcatcagcggagtgcttttcgcgccattgttcaacaaaataatcggacaactgattagactgagagtaccctgccaggatgctggatttaagaactaataccttgctcatggtgtttccttatagatatttgaatgggcaatgccccgttgcttgttgacactttattcacaatcttgccacagagatagcgcaataaatcgaagcctatgttcgaatttattgaacaacgcatagaaagccgcgatgtggtactctatatctatcatttaaaagaaaattaatcaggcagactactgcccactaacgttatgacagaacaacaaaaattgacctttactgccttgcagcagcggctggattcgctgatgctgcgtgacagactgcgtttttctcgccgtctgcacggcgtgaagaaggttaaaaatcctgatgcacaacaggccattttccaggagatggcgaaagagattgaccatgcggcagggaaagtcctgctgcgtgaagcggcacgaccggagattacttacccggacaatttgccggttagtcagaaaaagcaggacattctcgaagcgattcgtgaccaccaggtggtgatcgtcgccggggaaacgggttccggtaaaacgactcagctaccgaaaatctgtatggagctgggtcgcgggattaaagggctgatcggccatacccagccgcgtcggctggcggcgcgaacggtggcgaaccgtattgcggaagagctaaaaacggagccgggcggttgcatcggttacaaagtgcgtttcagcgatcacgtcagtgataacacgatggtcaagctgatgaccgacggtatcctgctggcagagatccagcaagaccgcctgctgatgcagtacgacaccatcattattgacgaagcgcacgaacgcagcctgaatatcgattttctcctcggctatttgaaagagttgctgccgcggcgtcctgacctaaaaattattatcacctccgcgactatcgacccggaacgcttttcgcgccactttaataatgcgccgattatcgaagtctccggtcggacctatccggtggaagtgcgctatcgcccgattgttgaagaagccgatgacaccgagcgcgaccagttgcaggcgatttttgacgccgtagatgaactgagccaggaaagccctggcgacattctgatctttatgagcggcgagcgagaaattcgcgataccgccgatgcgctgaacaagctgaacttacgccataccgaaatcttgccgctttatgcacggctttccaacagcgaacagaaccgcgtgttccagtcgcacagcgggcgacgcattgtactggcgaccaacgtcgcggaaacctcgctgaccgtaccgggtattaaatacgttatcgacccaggtacggcgcgtatcagccgctacagctatcgcaccaaagtgcagcgtttgccgattgagccaatttcgcaggcttcagctaatcagcgtaaaggccgctgcggtcgtgtgtcagaagggatctgtattcgtctctattccgaagacgatttcctctcgcgcccggagtttaccgacccagaaattctgcgtactaacctggcctcggttattttgcagatgaccgcactgggcttgggcgatatcgccgcattcccgtttgtcgaagcaccggataaacgcaatatccaggatggcgtgcgtctgctcgaagaactgggtgcgatcaccacggatgaacaggccagcgcctataaactgacgccgctcggtcgccagctctcgcagttgcctgtcgacccacgtctggcgcgtatggtgctggaagcgcaaaaacatggctgcgtgcgtgaggcgatgattatcacgtccgcgctctccattcaggacccgcgtgagcgtccgatggataaacagcaggcatctgacgaaaaacatcgtcgcttccacgacaaagagtctgacttcctggcatttgtgaatctgtggaattatcttggcgagcagcaaaaggcgctttcttcaaacgccttccgtcgcctgtgtcgtactgattatctcaactatctgcgcgtgcgcgaatggcaggatatctacacccagttgcgccaggtggtgaaagaacttggcattccggttaacagcgaaccggcggattatcgcgaaattcacattgcgttgctgaccggtttgctttcgcatatcggcatgaaagatgccgataaacaagaatataccggcgcacgtaacgcgcgtttctccatcttccccggttctggtttattcaaaaagccgccgaaatgggtaatggtggcggaactggtagaaaccagccgcctgtggggacgcattgctgcgcggatcgacccggaatgggtggagccagttgctcagcatttgattaaacgcacctacagcgaaccgcactgggaacgggcgcagggcgcggtgatggcaacggaaaaagtcactgtttatggtttgccgattgttgctgcgcgtaaggtcaactacagccagatcgatccggcgttatgtcgtgaactctttattcgccacgcgctggtggaaggtgactggcagacgcgtcacgcattcttccgtgaaaacctgaaactacgggccgaagtggaagaactggaacacaaaactcgtcgccgcgatattctggtggatgacgaaacgctgtttgagttctacgaccagcgcatcagccacgatgtgatttccgcacgtcacttcgacagctggtggaaaaaagtcagccgcgaaacgcctgatttgctcaactttgaaaagagcatgttgatcaaagaaggggcggaaaaaatcagcaagctggattacccgaacttctggcatcagggcaatctcaagctgcgtttgagctatcagtttgagcccggcgcggatgctgacggtgtgaccgtgcatatcccgctgccgttacttaaccaggttgaggagagtgggtttgagtggcagatccccggtctgcgtcgtgagctgatcatcgccctgattaaatcgctgccgaagccggtacgccgtaattttgtgcccgcgccaaactacgccgaagcgtttttaggccgcgtcacaccgctggaattgccgttgctcgacagccttgaacgagagttacggcggatgactggcgtcaccgttgaccgcgaagactggcactgggatcaggtgcccgatcacctgaaaatcactttccgcgtggtggatgacaaaaacaagaagctaaaagaagggcgctcattacaggatctgaaagacgccctgaaaggcaaagtgcaggaaacgctgtctgccgtggcggatgacggtatcgagcagagcggtttacatatctggagttttggtcaactgccggaaagctacgagcagaagcgcggcaactacaaagtgaaggcttggccggcgctggtggatgagcgtgacagcgtagcgatcaaactgtttgataacccgctggaacagaagcaggcaatgtggaacggtcttcgccgtttactgctgctaaatattccctcgccaatcaaatatttgcatgagaagttgccaaacaaagccaagctggggctgtactttaacccgtatggcaaagtgctggagctgatcgacgactgtatctcctgcggtgtggatcaactgatcgacgccaatggtggcccggtctggacggaagaaggctttgctgcgctgcatgaaaaagtccgcgctgaactgaacgacacagtggtggatattgcgaagcaggtcgagcaaatcctcactgcggtgttcaatatcaacaaacgtctgaaagggcgggtggatatgaccatggcgctggggctttctgacattaaagcgcagatgggcgggctggtgtatcgcggttttgtcactggtaacggttttaaacggttgggcgacacgttacggtatttgcaggcgattgaaaaacgactggaaaaactggcgattgatccgcatcgtgaccgtgctcagatgctgaaagtcgaaaacgtccagcaggcatggcagcaatggatcaacaaactgccgcctgcacgtcgtgaggatgaagacgtgaaagaggtccgctggatgatagaagagctgcgcgttagttacttcgctcaacaacttggcacgccttatccgatttcggataagcgtattttgcaggcgatggagcagattagcggttaacactgctatttgcctgataaatctaaaacccggtaagcatttagcgccgggttttttattaattctaaaaacgataagggaaaaaattcaggagttcagaaaaatacaattctctgctgcaagatgaataatgtttatctacagcatttccttaaaaaatatgtcaggcttgcggagtggcagttaaggaaatacgacttcctcctttcagagtgctccgcttctcactattatctcacgcagtattcttaagggaaggataaggaggaaccatgaatattaccccgtttccgacactttcgccggcaaccatagatgccataaatgttatcggacagtggctggtgcaggatgatttctccggtgaggtaccgtatcaggccgattgcgtgatccttgcaggcaatgcggttatgccgactatcgatgcggcatgtaagattgcccgcgatcagcaaattcctttactgattagtggtggtatcggtcactcgacaacttttttgtatagcgccatcgcacagcatccgcactacaacactatccgcaccactggcagagctgaagctaccatcctggcggatatcgctcatcagttctggcatattccgcatgaaaaaatctggattgaagaccagtcaacaaactgcggtgaaaacgcacgctttagcatcgcgctattgaatcaggccgtagaacgagttcatacggctatcgttgttcaggaccccaccatgcagcggcgcacgatggcgacgttccgccgtataaccggggataatcccgatgcaccgcgctggttaagttatcccggattcgttcctcagttaggaaataacgcagacagtgtaatctttgttaatccgttgcaaggattatggccggttgagcgttatctatcgctactcactggcgagttgccgcgtttacgcgatgatagcgatggctacggcccccgcgggcgagattttatcgttcacgttgattttccggcagaagtcatccaggcatggcaaacgctgaaacacgatgcggtgctcatcgaggcgatggaaagtcgctcgttacgttaaaaattgcccgtttgtgaaccacttgtttgcaaacgggcatgacttctgacttttatttctgcctttaattccttttacacttgtttttatgaagcccttcacagaattgtcctttcacgatgccgtctctctgataattgatgttaattaacaataaatttaccaaaaacaaacatgcaaatcacaggagtcgcccatgtcagtacccgttcaacatcctatgtatatcgatggacagtttgttacctggcgtggagacgcatggattgatgtggtaaaccctgctacagaggctgtcatttcccgcattcccgatggtcaggccgaggatgcccgtaaggcaatcgatgcagcagaacgtgcacaaccagaatgggaagcgttgcctgctattgaacgcgccagttggttgcgcaaaatctccgccgggatccgggaacgtgccactgaaatcagtgcgctgattgtcgaagaagggggcaagatccagcagttggctgaagtcgaagtggcttttactgcggactatatcgattatatggcggagtgggcacggcgttacgagggcgagattattcaaagcgatcgtccaggagaaaatatccttctgtttaaacgtgcgcttggcgtgactaccggcattctgccgtggaactttccgttcttcctcattgcccgcaaaatggctcccgctcttttgaccggtaataccatcgtcattaaacccagtgaatttacgccaaacaatgcgattgcattcgccaaaatcgttgatgaaataggccttccgcgcggcgtgtttaaccttgtactcgggcgtggtgaaaccgttgggcaagaactggcgggtaacccaaaggtcgcaatggtcagtatgacaggcagcgtctctgcaggtgaaaagattatggcgactgcggcgaaaaacatcaccaaagtgtgcctggaattggggggtaaagcaccggctatcgtaatggacgatgccgatcttgaactggcagtcaaagccatcgttgattcacgcgtcattaatagtgggcaagtgtgtaactgtgcagaacgtgtttatgtacagaaaagcatttatgatcagttcgtcaatcggctgggtgaagcgatgcaggcggttcaatttggtaaccctgctgaacgcaacgacattgcgatgggaccgttgattaacgccgcggcgctggaaagggttgagcaaaaagtggcgcgcgcagtagaagaaggggcgagagtggcgttgggtggcaaagcggtagaggggaaaggatattattatccgccgacattgctgctggatgttcgccaggaaatgtcgattatgcatgaggaaacctttggcccggttctgccggtggtcgcatttgacacgctggaagaggctatctcaatggctaatgacagtgattacggcctgacctcatcaatctatacccaaaatctgaacgtcgcgatgaaagccattaaagggctgaagtttggtgaaacttacatcaaccgtgaaaacttcgaagctatgcaaggcttccacgctggatggcgtaaatccggtattggcggcgcagatggtaaacatggcttgcatgaatatctgcagacccaggtggtttatttacagtcgtaatgagtgaaagaggcggaggttttttcctccgcctgtgcgcgtcagagtttagcgaatttttcgagggtgcgaataagctgcgtgacgaagccatattcgttatcgtaccaggcgaccgttttcaccagttgtaaatcgcccacggcggtaatttccgtttgcgtggcatcaaacaccgaaccgaaatggctgccaatgatatcggaagagactatttcttcatcggtataaccaaatgactcgttattgtttgtcgcctttttaagcgcgttgttcacctcttcggcagtcactttttttccgagaatcgacaccagttcagtgaccgaacctgttttcaccggcacgcgttgcgcatgacctttcagtttgccgctcagttccgggatcaccagaccaatggcttttgccgcccccgtagtgtggggaatgatattttctgccgctgcgcgtgaagcacgtaaatctttaccacgtgggccatccaccagtgactgggtgccggtataggcatgaatggttgtcatcgtgccgacttctatcccgaaactgtcatgcaaggctttggccatcggcgcaaggcagttagtggtgcatgacgccacggaaacaatggtgtcgttgccatccagagtgtcgtcattgacgttataaacgatggttttcatttcaccggcaggggcggaaatcaacaccttcttcgcgccagcatcaagatgcgcctgcgatttctcggcggaggtataaaagcctgtacattcgacaatgatttctgcgcctttcgctttccacggaatatttttagcctctttttcggcgtaaaccgcgatacttttcccatcaacgataagtgaatcttccgtataatcaacgctccaggggaacggtccgtagtttgaatcatgtttcagcaggtaggcgagaatttttggggaagtgagatcattaatagcgacaacgtctatgttgcttttgacttcaagtaatcgacgcaacaccagtcgaccgatacgaccaaaaccattaataccaactttactcatggtcttctcctgtcaggaacgttcggatgaaaattgatcctttccaggcttagaccaggatggcgggatgggcaatctacattcttgcagcgaaacgtaacgtactgaaaacaggtgaacaatatttaatgaaattttaagaaaagcccgttatgttaacggcaaattatgttaaagcaggaaatgttatgggaaataaatactcaaggttacaaatcagcattcactggctggtctttttgctggttatcgtagcgtattgcgcaatggagtttcgtggtttcttcccacgtagcgatcggcccctcatcaacatgattcatgtttcctgtggcatctcaattctcgtactgatggtggttcgtcttttgttaaggctgaaatgcccaaccccgccgattatacctaagccaaaaccgatgatgacgggactggcgcatttgggccatttggtgatttatctcctgtttattgcgctgccagtgattggtttggtgatgatgtataaccggggcaacccgtggtttgcgtttggtttgacgatgccttacgcttcagaggccaatttcgaacgggttgatagcttaaagtcgtggcatgaaacgctggcgaatctgggatattttgtcatcgggttgcacgctgcggctgcactggcacaccactatttctggaaggacaacacacttctacgcatgatgccacgtaaacgttcctgaaggatatttaaagaaaacgcctgtactaaaaccgacccgtggtacaggcgaagaatacgggcctacatcggaagcgcctattatatttatttgtatgacaaataaaaccataatccttgtctatacgtccatctggcttatctttaatcaattcacccgatctttgatctcatcaacggtatcaaaataaaccagcgtataacgttcaaatcgaacataagattcgataaatcatggaggttatatgaaaaaactggcacttatcctggttatgggaacgcttgtttccttttatgccgatgccgggcgcaaaccctgttctggttcgaaaggggggatctcacactgtacggcaggcggcaaatttgtctgtaatgatggttctattagtgcatcgaaaaaaacatgcactaactgaagtgtaaaaggggtgccatgagaaaatgaatccgctagtcagatgcgcggggaaaatccccgcgcttgcccttacctggacgtgcaggccatgagcgcagcaacctccttatcaccgtcccggaaccgcagttcgtagagcgtttgtcgggtcagtgtgaatgtcagaatcgtgttactctcgcaaggccctggatttgccgttgtcgccagcgaagtacggacactcgcaagccgcagcgctcaggcggcgaaagagattgaaggcttgatcagtgaatcagtcaggttaattgacctgggagcggatgaggtggccacggccgggaaaaccatgagcactattgttgatgccgtcgcgagtgtcacacatatcatgcaggaaatcgccaccgcctcggatgaacaaagtcgaggcataacgcaggttagccaggcgatttctgaaatggataaggtgacgcaacagaatgcttctctggtagaagaggcctcaacggcggcgttgtcccttgaagaacaggcggcacgactaactgaggcggtggacgtattccgtctgaacaaacattctgtgtcggcagaaccacgaggagctggtgaaccagttagttttgctacggtgtgaaaatgttaaaggagggatcgacagatcccttcacctttcagaacggcattgattttcgaatagcgttaatcatcaactggcaaccagaagagaacgtcgcatctacgcgggtcagtattccaatcggttcgcctgcaccatgtcccggaacaggcagggctaccagcgtggcatgacgcaggtcgtcttttacagcgccagaagggacaaaccacacgtaatcgtattcaaccgtaagttgacgagatagcgaagcagacagcgtttcgatacaacccgaaggaattttacatccctggctctgcactaatgcatctgaatgctggcgtggcgcagtgccttctggtgatacaacgaccggccattccagcacccggcttagcgttacgttctcctgaagtagcgggtgattagggcggacaaccagcttcagcgattcaagaaacagcagttcataattaagcccgttcatcagttcaggatctgacatccgaccaatgccgatatcgatttccccggtttttaaacccgccagaatcatagggttactcattgtcgcaacttgcaaggtcgtctctttttgttgctgatgaaactgacctataaccgaaggtaatatccctagtgccgcagtaggtagcgcaccaaccctgacgacatcattattaagaccttctttacgatgaagcgactgtccggcagtgttgatggcgtcaagaactctgactgcatgcgttaaaaattgttcgccgggtaaggtaagttgcgccccctgacgaccacgctcaaacaagcgagcgcccgtcagctgctccagttcattcaatgtcttagagagcgcaggttgactcaaattaagggtttcagccgcgcgccccaaagttccttgttgtgcgacagctacgaatgtatgaaggtggcgcaaacggatgcgctgactaaacagactatttttttccataagcgatgttaaaaacgaagcggtgtcgctgacaagtgaagttgttttattatgataacttgattgcaaaatattattaacaattaaagcaactatgttacagcaaaatggataatattgatgttttcgcggcgagatcacagtttgtaaattcttccagccggagtgaatgcggttacctacactccagattactgaccactggaggcagacactatggcgaacagcatcacggcggatgagattcgggaacagttttcgcaggcaatgtcagccatgtaccagcaagaagttccgcagtacggcacgctgctggaactggtagctgatgtaaatctggcggtgctggaaaacaatcctcaactgcacgaaaaaatggtaaatgcagacgagctggcgcgactgaatgttgaacgtcatggggcgattcgcgttgggactgcacaagagcttgctactcttcggcggatgtttgccattatggggatgtacccggtgagctattacgatctctcgcaggcaggggtgccggtacattcgacagcatttcggcccattgatgatgcttctctggcgcgtaatcccttccgcgtttttacctcgttactccgtcttgagcttatcgagaacgaaattttgcgccagaaagcggcggagattctgcgtcagcgcgatatcttcaccccacgttgtcgacaactgttagaggaatatgagcagcagggcggttttaacgaaacacaggcacaggagtttgtgcaggaagccctggaaacgtttcgctggcaccagtcagcaacggtagatgaagaaacctatcgcgccttgcacaacgaacatcggttgattgctgatgtggtctgttttcctggatgccatatcaaccatctgacgccacgtacgctggatattgaccgggtgcagtcgatgatgcctgaatgcggaattgaacccaaagttctgatcgaagggccgccgcgccgcgaggtgccgattttactacgccagaccagctttaaagcactggaagagacggtgttgtttgcggggcagaaacagggcacacataccgcgcgctttggtgaaattgagcagcgtggtgtggcattaacgccgaaagggcgacaactgtatgatgatcttctgcggagcgctggaaccgggcaggataatctcactcaccaaatgcatttacaggaaaccttccgcacttttcctgacagtgagtttttaatgcgtcagcaagggctgggatggttccggtaccgtctgacgccttcgggtgaggcgcatcgtcaggcgattcatcccggagacgatccacagcccttaatagaacgtggttgggtagtggcgcaacccattacctatgaagatttcttgcccgttagcgcggcggggatcttccagtcaaatctgggtaatgaaacgcaggcatgcaatcacggtgatgccagtcgcgaagcatttgagcaggcgttggggggtccggttttggatgagttccagctttatcaggaagcggaagaacgcagtaaacgtcgctgtggtttgctttaaattctgaccatccgcctttgcaaaaatttgcctgattttacaaacgaatcaggctcatcccatcgacataaaaaaaatgccaatttatgcatattctctgatttcaacaattggattattaataaatattgtctagagtgagcggtcataaataagcactttcttgccgctgaaaatgaccagcgcgggaccattcacaacaccagaaggactcactttcaggtatggatcgtagacgatttattaaaggttcaatggctatggccgccgtgtgcggtaccagcggcattgcttctcttttttctcaggcggcattcgcggccgattctgatattgccgacgggcaaacccagcgttttgacttctccattctacagtcaatggcgcacgacttagcgcaaacagcatggcgtggtgcaccacgtccgttacctgacactttggcgacaatgacgccgcaggcttataacagtattcaatacgacgccgaaaaatcgctctggcataacgttgagaaccgtcaactggacgctcagtttttccatatgggaatgggattccgtcgccgcgttcgtatgttttctgtagatccagcaacacatctggcgcgtgaaattcactttcgcccggagttgttcaaatacaacgatgcgggtgtggataccaaacaattagaagggcaaagcgatctcggttttgccggttttcgcgtgtttaaagcccccgaactggcgcgccgtgatgtagtatcattcctcggcgcgagttatttccgcgccgttgatgacacatatcaatacggtttgtcggcccgcggcctggcgatcgacacttacaccgacagcaaagaagagttccccgactttaccgccttctggtttgatacggtaaaaccaggggcaaccacctttactgtttatgcgttgctcgatagcgccagcattactggtgcctataagttcactatccattgtgagaaaaatcaggtgattatggatgtggaaaatcacctgtatgcgcgcaaagacattaaacagctgggcattgcaccgatgaccagtatgttcagctgcggtactaatgaacgtcggatgtgcgacaccattcatccgcaaatccatgactctgatcgtctgtccatgtggcggggcaacggcgagtggatttgccgtccgctgaacaatccgcaaaaattgcagttcaatgcttacaccgacaacaacccgaaagggtttggtttattgcaactggatcgtgatttctcccattatcaggacattatgggctggtataacaaacgcccaagtctgtgggtggaaccgcgtaacaagtggggtaagggcaccatcggcctgatggaaatcccaacaacgggcgaaacgctggataacattgtctgcttctggcagccagaaaaagctgtgaaagcgggtgatgagtttgcattccagtatcgtctgtactggagtgcgcaaccgcctgttcattgcccattagcgcgcgttatggcgacgcgtaccggcatgggcggtttcccggaaggttgggcgccaggtgaacactatcccgaaaaatgggcgcgacgttttgccgtcgatttcgttggtggtgatctgaaagctgccgcgccaaaaggcattgagccggtgattacgctttccagtggggaagcgaagcaaatcgaaattctctatattgaacccattgatggttatcgtattcagtttgactggtatccgacttcggactccactgatccggtcgatatgcggatgtatctgcgttgtcagggcgacgctatcagtgaaacatggctgtatcagtatttcccgccagcgccggataaacgtcagtatgttgatgaccgcgtgatgagttaatcattttttcttcggcatcttcttcgggaggtgccgtctggttaaacacgatcccgctcgcatttttccctaagttaaatgagtaatctgatggtgtgtatttcagatacaccttgtcagccactaacagggagtgcgtatgtttccagaataccgagatttaatatcccgtctgaaaaacgaaaatcctcgctttatgtccttgttcgataaacacaataaacttgatcatgaaattgccagaaaggaaggttccgacggtcgagggtacaatgcggaagtggtccgcatgaaaaaacaaaagctacagttaaaagatgagatgctcaaaatcctgcagcaggtgagcgtcaaagaggtgtaaactttcctaagccgccagccaggcggcttttttaacaactgcatggattgactggagataagatgaccgaaacgataaaagtaagtgaatcacttgaattacatgctgttgcagaaagtcatgtcacacctctttatcagttaatctgtaaaaatagaacctggttacagcagtcgctaaactggccgcagtttgttcaaagtgaagaggacacgcgaaaaactgtgcagggcaatgtaatgttgcatcaacgcggatatgccaaaatgttcatgattttcaaagaagatgaacttatcggcgttatctcgtttaatcgtattgaaccactgaataaaaccgctgaaatcggctactggctggacgaatctcatcaggggcaggggatcatttctcaggcgctgcaggcattgattcatcattacgctcagtctggtgaacttagacgcttcgtgatcaaatgtcgggtggataatgcgcaaagcaaccaggtcgctttgcgcaatggttttatccttgaaggttgtctgaaacaggctgagttcctgaatgatgcctatgatgatgtgaacttatacgcgcgtattatcgattcacaataaccctgccagcggcgttcgagtaatgcgctcctcgccgttaatgacttttggaccacggacatgaaccgtgtcgccatcaaaggcttcaacgacggcgtggtcggttaactccacatggttttcaattatcaccgcaccagtaatacggctctcaccttgtatgacaacgtcctcgtcgagcagaatcggtccgccacataccacggcatttccgccaatcaagacatgatgttttaacacacaattaccttccacaatggcatattccgccacctgcgaactgtaatgaatcgtcggaatggcatcttcttctatgccagctttcacctgcgcgtgaccgtaaactttagcacaatcgcatagccagacgttgttctcttcattaccttcaatactggcaaaatcaaaaacttcggcgcgatgttcaataaaagcataccggacgacggcatcgccataaatttgtgcctggtggacaatccgcgaggcgctaaccctcgcgcgatcataaatttgtagcaggagttgatggtcgggcgttaagccttgtgcggcgacgatcatagaatgttgatcaattaaggcgtgaccaaatattctacattgaccgcaaactaatgagtcactaatggtgacactgtcacttatatatgcaccctggctgatttcactattatcgatccagacattatccgttgcgtaaacctctccccacagcacgctggtgccggtgatacgcgtattcccggaaatcaccgttccgccgaacgcaatagcattctggtcgtaaatccagcaatttccttcctgtgctaacaccgtttcgtgatcgatccagccgccagcgcttcctgctatcacatcgttaaaatcgctcatggcgataatttgccgtaataacacactttttttagtgccatcttcctgataactaaaggctcgctgttcttcacttagacgatatttacgcatagcgttttcccacaggtgacttactataaccgtagcaaattctgcggctctggctatgctcgagaaaattccataaaatgcatttcaaatatactttataaattaaacaaaatgagtaagaagatgcagagcgataaagtgctcaatttgccggcaggctactttggtattgtgttggggacgatagggatgggatttgcctggcgctatgccagccaggtttggcaggtcagccactggttgggggatgggctggtgattctggcgatgatcatctggggattattgactggcgcatttattacccgactcatacgctttccgcatagcgtgctggcagaagtgcgccatccagtgctgagcagttttgtgagtttgtttccggcaacgacgatgctggtggcgattggttttgttccgtggtttcgcccactggcggtgtgcctgttcagttttggtgtcgtggttcagttggcttatgccgcctggcaaactgcgggattatggcgcggatctcaccctgaagaagctaccacgcctggactgtatctgccgacagttgccaacaactttatcagcgcaatggcctgtggtgcgttgggctacaccgacgccggtctggtgtttttaggcgcaggcgttttctcatggctaagcctggaaccggtgatcttgcagcgtctgcgcagttcgggagaattacccacggcactgcggacatcactcggcattcagctcgctcctgcgctggtggcctgtagtgcctggctgagcgtcaacggcggcgagggtgacacgctggcgaaaatgcttttcggttatggactgctgcaactgctgtttatgctacgtctgatgccatggtatctctcccagccatttaatgcttcattctggagtttctcgttcggtgtatctgcactggcaaccaccggtttgcatctggggagtggcagcgataatggatttttccatacgctggcggtgccgctgtttatctttaccaattttattattgcaatactgctcatccgtacttttgcgcttctgatgcagggaaaattgttagtcagaaccgagcgcgccgttttaatgaaagcagaggacaaagaatgatcattcgtgatgaaaactattttactgataaatatgaattaacccgcacacactctgaagtgctggaagcggtgaaagtggttaaaccgggtaaaacgctggatctgggctgtggcaatggtcgtaacagtctttacctggcagccaatggttatgatgttgacgcatgggataaaaatgccatgagtatcgccaacgtcgagcgcattaagtccattgaaaatctggataatttacacacccgggtcgttgatctgaataacctcacatttgatggacagtacgattttattctttcgactgtggtgctgatgttccttgaggctaaaaccatcccagggctgattgccaatatgcaacgttgcactaaacctggcggttacaacctgattgtggcggcgatggataccgctgattatccatgtaccgtcggcttcccgtttgccttcaaagagggggaattacgtcgatattacgaaggctgggagagggtgaaatacaatgaagacgtcggcgagctgcaccgcaccgacgccaacggtaatcgtattaaactgcgtttcgccacgatgctggcacgtaaaaaatgatccggtaagaacaaagcgcgtgaaaattccccacgctgagatagtttactgttcttcttttcggtaagcatattttttatcgaagggatgtgaaattaatcacagtagtcgaagttttttagccgcttaacttactgaaatttaactactgatgattgacttagcccctttttcggcattgactatgtcgtctgaaaaggggctaaaaaatttattttcaccaacactttttttgccacaacacgaagcggcgctttttgctataacttagaaagtaatataatcatctcaggaaactattcatgcgtaccacatcatttgcgaaagttgcagctttatgcggcttgttggctctgtctggttgtgcctctaaaatcacccagccagataaatattctggttttttaaacaattactctgatttaaaagaaacaacctcggcaacaggtaaacctgttttacgttgggtagacccgagttttgatcaaagcaaatatgacagcatcgtctggaacccaatcacttattatccggtaccgaaaccttctacccaggtagggcagaaagttctggataaaattttgaactataccaacaccgaaatgaaagaagcgatagcgcagcgtaaaccactggttaccaccgctgggccgcgtagtctgattttccgtggggccattaccggtgtaggtaccagtaaagaagggctgcaattctatgaagtggttcctgttgcattagtggttgcggggacgcaaatggctacaggccaccgtaccatggatactcgcttgtattttgaaggtgagctgattgatgcagcgactaataaaccggttatcaaggtcgttcgtcagggcgaaggtaaagacctgaataacgaaagtacgccaatggctttcgaaaatattaaacaagttattgatgacatggcgaccgatgccaccatgtttgacgttaacaaaaagtagttccagacgcgccatcgttagatggcgctttttattatcggtttctgttagcgattaaattcaacaccacgtaacaaacgcctccggcaattaatccccaaaacgcagaaccaatcccgaacagcgtcaatccacttgccgttaccagaaatgccaccaccgccgcgtcgcgctcacgctcattatgcagcgcctgatacaaactgccgccaatggtactcaacagcgccagacctgccagcatctggatccaacttacgggcagggcagccatcatcccggtaatggcactaccaaacagacctgcgagcaaatagaaaatgcctgcaacggcagcggccagccaacgttgatctttatccggatgcgcttccgggctttggcaaatagccgcggtgattgccgcaataccgacggaataaacgccgaaaggggaaaaaaccagtgccagcaatccagtaaatacaattaatggcgaaacaggagccgaatatccggcggctttcattgctgcgatacccggtgcgttttgcgatgccatcgtcaccagaaaaagggggagtgcaacgctcaggctgtgagcaaacgaaaaatcagggctaatataagtggggagaacgggtttaaagacaacatcagttgtgacaacgtcaccttgcgcgataacgatcacgaccccaataatcatcgcggcaattaccgcatagcgcggcgcaacggccctggttgccagccataccagcaacatactgccacacaacgtaaattgaccatccaggctcgcaaacgcctgtaaaccaaagcgtaataaaatcccggcaagcattgccgccgcaagcgagtgcggaataatgcgcatcagacgagcaaagagtcccgttatgccgcagaggactattaacacgttggtgacaataaaaacgccgatggcttcgttaagtgttagtccctgtaatccggtgaccaacaaagccgcgccaggcgttgaccatgcggtgagaacaggtacgcgataccataatgtcagagtcagcgtactgacgcccattgccagccccagcgccgtcatccagccagagatttgtgcagtggtggctccggcgacaatcgctgcttgccagattattgccgctgaactggcgtagccaattaataccgccagaaaccccgccagtagcgtgggtggaggaatagaaaacagacgcatagtcacctcgtgcgttataacgtacaggtaccgtagcatttgtccgttataacgcacaagtgataaacttccgttttgccggaggagtcgcatggaaaatctcgctcgctttttatccaccacacttaaacaactacgtcagcagcgcggctggagtctttcgcgactggcagaagcgacgggcgtttctaaagcgatgttagggcagattgagcgtaatgaatccagcccgacggtcgcgacattatggaaaattgccaccgggttgaacgtgccattttcaacatttatttctccgccgcagtcctctacgccttcagtttatgatccacaacggcaggcgatggtgatcacttcgctgtttccttatgatccacaactctgctttgaacacttctcgattcagatggcacccggtgcaataagcgaatcgacgccccatgaaaagggggtaatcgaacatgtcgtcgtcattgatggacaacttgatctgtgtgttgatggtgaatggcagagccttaattgtggggaaggcgttcgatttgctgcagacgtcacgcatgtctatcgtaatggtggggagcaaaccgtacattttcattccctcatccattacccgcgcagttaagcgggaaaactatttcgcaacgtcgcgcttgtggctaaaatagccgccatttttcagctactggataagaaagtgaccgtatcttctcatcgtcttgaactgttaagcccggcacgcgatgccgccattgcccgcgaagctattttgcacggtgccgatgctgtttatatcggcggccctggttttggtgcccgtcataatgccagtaatagcctgaaagatattgccgagttggtgccgtttgcccatcgttatggtgcaaaaattttcgtcacgcttaacaccattttgcatgatgatgagctggaacccgcgcaacggctgattactgacctctaccagaccggtgtcgatgcgctgattgttcaggatatggggattctggaacttgatattccgccgattgaactgcacgccagtacgcagtgcgatattcgtacagtagaaaaagcgaagttcctctctgatgttggcttcacgcagattgtgctggcgcgagagctgaatcttgagcagatccgcgcgattcaccaggccacggacgcgaccattgaattctttattcatggcgcattgtgcgtggcctattcgggtcagtgctacatttctcatgcgcaaacagggcgtagcgccaaccgtggcgattgctcgcaggcgtgccgtttgccatacacattgaaagacgatcaggggcgggtggtttcctatgaaaaacatctgctgtcgatgaaagataacgatcagactgccaacctcggcgcgctgattgatgctggcgtacgctccttcaagattgaagggcgttacaaagatatgagctacgtgaagaatatcaccgcccattatcgtcagatgctggatgccattattgaagaacgtggcgatctggcgcgcgcttcatcaggtcgtactgaacatttctttgttccatcgacggaaaagactttccaccgtggtagcacagattattttgtgaatgcccgtaaaggcgatattggcgcgttcgattcgccgaaatttatcggcctgccggtgggcgaagtattgaaagtagcgaaagatcatattgatgttgccgttaccgagccactggcaaatggcgatggcctgaacgtgatgattaaacgtgaagtcgtcggttttcgtgccaatacggtagagaaaaccggagaaaatcagtaccgcgtctggcccaatgaaatgccagcagatttgcacaaaattcgcccgcatcacccactaaaccgaaatcttgatcataactggcagcaggcactgacaaaaacctccagcgaacgccgggtggcggtagacattgaactgggcggctggcaggaacaactgattctgaccctcaccagtgaagagggtgtcagcatcacacatacgctggacgggcagttcgacgaagccaataacgccgaaaaagcaatgaacaatctgaaggatggtctggcaaaactggggcaaaccatctattacgcccgcaatgtgcaaattaatttgccgggggcgctgtttgtaccaaacagtctgttaaaccagttccgccgtgaagccgccgatatgcttgatgctgcgcgtcttgtcagttaccagcgcggcagccgtaaaccggttgctgatcctgcgccggtttatccgcaaacgcatctgagtttcctcgcgaacgtatacaaccagaaagcgcgtgaattttatcatcgctatggtgtgcaactgattgacgcggcgtatgaggcacatgaagagaagggcgaagtcccggtgatgatcaccaagcattgtctgcgctttgccttcaatctgtgcccgaaacaggcgaaaggcaatatcaaaagctggaaggcgacgccaatgcaactggttaacggcgatgaagtattaacgctaaagtttgattgccgcccatgcgagatgcacgtcattggcaaaatcaaaaatcacatactgaaaatgccgttaccgggaagcgtagtggcatccgtaagtccggatgatctgctgaaaacattgccgaagcgaaaagggtaaaacgccagttttcgggttactcaccactcatcaaatctgcatgatattgcctgccgggtaaggtgtcacgccgcatccggcaacacacgactcaacgctgtcccgcttctggtttgcgcgatttttgccagtaaaaatgctcgcgcaaaccttccgccgactcttccgccacagcacgcaattcatcgctgtccgcttcatgacgcaactgatgatccacattctttacccacataaattcatgtcctttgtgccctgccatgagttgtcctgagaacagtgcacacgttaataagacaaccgataacgccttcgaaaacatcccgccacctttttctaaccttttgccgctatgatgccgatcgtttcttgaggttattattcagttttgcaaattagagcaaagaaattctggaatcttccttcctgattttgcattgcattctgccgttgcggcgatttagtgctattttcgagcacattacacacggaggtaaacttcgccattaaatagtcacgatcactttattgaagtgcctttgagcgtcgcctctaaggtattgctgttaaatgcttttttacagtcagaaatcactcagcaagagttagcccggcgaattggcaaacataaacaggagattactcgcctatttaatttgcaccatgcgacaaaaatcgacgccgtccagctcgcggctaatgcgcttggcaaagagttatcgctggtgatggtttgattacagttaatgaaaagttgtcatttttaacaactgatatagactgccgaatcatctgcacataattacgattcgataatgaaaaaataccagcagcttgcagaacaattacgcgagcagattgcgtcgggtatctggcaacccggcgatcgtttgccttcgttgcgtgaccaggtggcgctttctggcatgagctttatgactgtcagccatgcctatcagttgctcgaaagtcagggatatattatcgcgcgaccgcaatcgggttattacgttgcgccacaggcaataaaaatgccgaaagcgacagtcattccagtcacacgagatgaagcagtcgatatcaacacctatatttttgatatgttgcaggccagtcgcgatccgtcggtagttccgtttgcctcggcctttcccgacccgcgacttttccccctccaacaactaaaccgctcgctggcgcaggtaagcaaaaccgccacggcgatgagcgtgattgaaaacttaccgccaggaaacgcagaactgcgtcaggctattgctcgtcgctatgccttacagggcatcaccatttctcctgatgaaattgtcattactgccggggcgttagaggcattaaacctcagtttgcaagtggtaactgaaccgggcgattgggtgatagtagagaatccttgtttctacggcgcgttgcaggcgctggagcggttacggctgaaggcgttatcggtggcgacggatgttaaagaagggatagatcttcaggcgctggaactggcgttgcaggagtatccggtgaaagcgtgctggctgatgactaatagccagaacccacttggatttaccttaacgccgcagaaaaaagtgcggctggtagcgttgctcaatcagtacaacgtaacgctgattgaagatgacgtttatagcgaactttattttggacgggaaaaaccgctgcctgcgaaagcgtgggatcgccacgatggtgttttgcattgctcttcgttttcgaaatgtctggtgcctggttttcgtattggttgggtcgccgccggaaaacatgcacgtaaaattcaacgcttgcagttgatgagtacgctttccaccagctcaccgatgcagcttgcgctggtggattacctttctactcgccgatacgatgctcatcttcgtcgcctgcgtcgccagcttgcggaacgtaaacaacgcgcctggcaggctttgctgcgttatctgcctgcggaagtcaaaattcatcacaatgacagcggttattttctctggctggagctccccgagccgttagatgcaggagaattaagcctggtggcactgacgcatcatatcagtattgcgccgggtaatatgttttctaccggtgaaaactggtcacgtttttttcgttttaataccgcgtggcagtggggagaacgtgaagaacaggcggtaaaacaattaggcaaacttattcaagaacggctgtaatagcgtttaatttaattcctctcaggttgggtaatatgaatttcgaatagcagtcatatatcctaactccttgtctatactccagaagataaccttacagacggcataatgcgcggtagctcacaacctgattaaattttctcagggccgaaggtgtgcctgcaagccgccgtctatggttaaacaaggagatatttttacggcacggcggctgaacaattaattacgacaggagtaagaccttatgagcaagacatttgcccgcagcagcctgtgtgcgctcagcatgacaataatgaccgctcacgccgccgaaccgcctaccaatttagagaatccggaagggcgactggatattatcgcctggccgggatacatcgaacgcggacaaactgataaacagtacgactgggtaacgcaattcgaaaaagagacaggctgcgcggtgaatgttaaaaccgccgcgacttccgatgaaatggtcagtctgatggccaaagggggttacgatctggttacggcatccggcgatgcctcgctgcgtttgattatgggcaaacgcgtgcagccgattaataccgccttgattcccaactggaaagcgctcgatccgcgcgtggttaaaggcgactggtttaacgttggcggcaaagtttacggcacaccttaccaatgggggccgaacctgctgatgtacaacactaaaaccttcccgacgccgccggatagctggcaagtggtttttgttgagcagaatctgccggacggcaagagcaataaaggccgggtacaggcttatgatggccctatctacattgcggatgccgcgttgttcgtcaaagccacgcagccacagttgggcatcagtgatccgtatcaactcaccgaagaacagtatcaggcggtgctgaaagtgctgcgcgatcaacataatttgatccatcgctactggcatgacactaccgtgcaaatgagcgatttcaaaaacgagggtgtggttgcttccagtgcatggccctatcaggccaacgccctgaaagccgaaggccagcctgtcgctaccgttttcccgaaggagggcgttaccggttgggctgacaccaccatgctacatagcgaagcgaaacatccggtttgcgcctacaaatggatgaactggtcattaaccccaaaagtgcagggcgatgtggcggcctggtttggctcgctaccagtagtgccgcaagggtgtaaagccagtccgttattaggcgagaaaggttgtgaaacaaacggttttaactatttcgataaaatcgccttctggaaaacgcctatagcagaagggggcaagtttgttccctacagtcgctggacgcaggattacattgccattatgggcggtcgctaacttcgctggggtgttttatgaagtacgcagtggagtttgacaacgtctcacggttgtacggtgacgtgcgcgcagtagatggcgtcagtattgcgataaaagatggtgagttcttctctatgctggggccgtccggctccggcaaaaccacttgcctgcgcctgattgctggattcgaacagctttccggcggggctatctctatttttggtacgcccgccagcaatctgccaccgtgggagcgggacgtgaatactgtcttccaggactacgcgctatttccgcatatgtcgattcttgacaacgtagcctacgggctgatggtcaaaggcgtgaataaaaagcagcggcatgcaatggcgcaagaggcgcttgagaaagtggcgttgggggttgtacagcaacgtaaaccgtcacaactttctggtggtcagcgccagcgagtcgccatcgccagagcactggtgaacgaaccgcgtgtgttgttgctggatgaaccgctcggcgcgctggatctcaaattgcgagagcaaatgcagcttgagctgaaaaagctgcaacagtctctcggtatcacttttatcttcgttacccacgatcagggcgaagcgttatcgatgtccgatcgggtggcggttttcaataatggacgcattgaacaggtcgattccccgcgtgatctctatatgcgcccgcgcacgccgtttgttgcgggattcgttgggacatcgaatgtttttgatggactgatggcagagaaactttgtggcatgacgggaagcttcgcactacgaccggaacatatccgcctcaacacccctggcgaagtgcaggctaatggcacgatccaggcggtgcaatatcagggcgcagcgacccgttttgaactgacactgagcggcggtgaaaaactgctggtgagtcaggccaatatgacaggcgaagaactgcctgccacgctcacgcccggacaacaggtgatggtttcctggtcgcgtgatgtgatggtggcgctggttgaggagaggtgaatggcgatgaacgtattgcaatcaccttcacgtccaggtctgggtaaggtgtccggtttcttctggcgtaatccggggctggggctgtttttgctgctgcttggcccgctaatgtggtttggcattgtctatttcggctcgctgctgacgctgttatggcagggcttttatacctttgacgatttcaccatgtcggtaacgccggaactgacgctggcgaatatccgtgcgctgtttaatccggcgaattacgacatcattgtccgcacgctgaccatggctgtggcagtcactatcgccagcgccattctggcttttccaatggcgtggtatatggcgcgctataccagcggaaaaatgaaagcgtttttttatattgcggtaatgttgccgatgtgggcgagctacattgttaaagcctatgcctggacgttattgctggcaaaagatggcgtggctcagtggtttttacaacatcttgggctggaaccactgctgactgcgttcctcacgctaccggcggtgggaggtaatacgctgtcaacttccgggctggggcgctttctggtgtttctctatatctggctgccgttcatgatcctgcccgtgcaggcggcgcttgagcgtttgccgccgtcattgttgcaggcgtcggctgatcttggcgcacgtccacgacaaacctttcgctatgtggtgttgccgctggcaatcccgggtattgccgctggctctatctttaccttctcactcacgctgggcgattttattgtcccgcagctggttggccctccaggatattttatcggcaatatggtttattcccagcagggggcgattggcaatatgccgatggcggcggcattcaccctggtgccgattgttctcatcgcactttacctggcgttcgtgaaacgtctgggagcgttcgatgcactctgaacgcgcaccgtttttcctcaaactggcggcctggggcggcgtggttttcctacattttcccatcctgattatcgctgcctatgcgtttaacactgaagatgcggcgtttagttttccaccgcaaggcctgacgctgcgctggtttagcgtggcagcacagcgtagtgatattcttgatgccgtgacactgtcacttaaagtggcggcgctggcgacattaatcgcgctggtgttagggacgctggccgctgccgcgctgtggcgacgagactttttcggcaaaaacgccatttcgctgttactgttgctgcccattgcgctgccgggcattgtcactggtctggcgctattaaccgcctttaaaaccatcaatctggagccgggatttttcaccatcgtggtcggtcatgcgactttttgcgtagtggtggtgtttaacaatgtcatcgcccgttttcgccgcacctcgtggagtctggttgaggcgtcaatggatcttggggccaatggctggcaaaccttccgctacatagtgttgccgaatctcagttcggcgttactggctggaggaatgctggcgtttgccttgtcgttcgatgaaatcatcgtgacgacttttacggcaggtcatgaacgaacgttaccgttgtggttgctcaatcagcttgggcgaccgcgtgatgtaccggtaaccaacgtggtggcactgctggttatgttggtaacaaccttgccgatcctgggggcctggtggctaacccgcgaaggcgacaatggtcaataaccactgatacaggaatatgctatgcaacataagttactgattaacggagaactggttagcggcgaaggggaaaaacagcctgtctataatccggcaacgggggacgttttactggagattgccgaggcatccgcagagcaggtcaatgctgctgttcgcgcggcagatgcagcatttgccgaatgggggcaaaccacgccaaaagcgcgtgcggaatgcctgctgaaactggctgatgttatcgaagaaaatggtcaggtttttgccgaactggagtcccgtaattgtggcaaaccgctgcatagtgcgttcaatgatgaaattccggcgattgtcgatgtctttcgctttttcgccggtgcggcgcgctgcctgaatggtctggcggcaggtgaatatcttgaaggtcatacttcgatgatccgtcgcgatccgttgggggtcgtggcttctatcgcaccgtggaattatccgctgatgatggctgcgtggaaactggctccggcgctggcggcagggaactgcgtagtgcttaaaccatcagaaattaccccgctgaccgcgttgaagttggcagagctggcgaaagatatcttcccggctggcgtgattaacgtgctgtttggcagaggcaaaacggtgggagatccgctgaccggacatcccaaagtgcggatggtgtcgctgacgggttctatcgccactggggaacacatcatcagccataccgcgccgtccattaagcgtactcatatggaacttggtggcaaagcgccagtgattgtttttgatgatgcggatattgaagcagtggtcgaaggtgtacgtacttttggctattacaatgccggacaggattgtactgcggcttgtcggatctacgcgcaaaaaggcatttacgatacgctggtggaaaaactcggtgctgcggtggcaacgttaaaatcgggttcgccggatgacgagtctacggagcttggacctttaagctcgctggcgcatctcgaacgcgtcagcaaggcggtagaagaggcgaaagcgacagggcacatcaaagtgatcactggcggtgaaaagcgcaagggtaatggctattactatgcgccgacgctgctggctggcgcattacaggacgatgccatcgtgcaaaaagaggtatttggtccggtagtgagtgttacgctcttcgacaacgaagaacaggtggtgaactgggcgaatgacagtcagtacggacttgcatcttcggtatggacgaaggatgtgggcagggcgcatcgcgtcagcgcgcggctgcaatatggttgtacctgggtcaatacccatttcatgctggtaagtgaaatgccgcacggtgggcagaaactttctggttacggcaaggatatgtcactttatgggctggaggattacaccgtcgtccgccacgtcatggttaaacattaaggataatattgcagatcgtaagagtatgagatgatcttgcgtactgtcagagcactgatttctctgacagtacgtgctgcgtgcaaaatcacaacatcaaataaaccagccaaatctcatagagataagagtaaacaaaccaacagcagcaaagacatttatcagtactacagttctactggaaacattcatttttgccaccttttatcattgcccctatgtgtatagtacgggttaagaaaatccgcaataatactcattctgaagatagataagggcaagttgctgtttgatgattttttctctaactggtgaaaaaacttgatgcacgtcaaaagatgacgcatatttgcgcgcgttttattcatctggctggacgcccgtacatgtctctctatcaacatatgcttgttttttatgcggttatggcagcaatcgcatttcttatcacctggtttctttctcacgataagaaacgcatccgtttcttaagcgcctttctggtgggggcaacatggccgatgagtttcccggtggcgctgttgttttctctgttttaaatcttatgcactggcttgacggcaccacgcagacttatatcatttggatgaatcgataaatttcacaagtggctaaggagaaagtatgtcgcatctggatgaagtcatcgcgcgcgtggatgccgcgattgaagagagcgtcattgcccatatgaacgaattattaatcgccctgagcgatgacgcggagttaagtcgggaagatcgctacacccagcagcagcgtttgcgcaccgctattgctcatcacggtcgcaaacataaagaagatatggaagcgcgccacgaacagttaaccaaaggcggtaccatcctctgattaaaatgagcgtctggccaccagccaggcgccaaccacaagtaaaattgcgccacaaattgggccgatcaacgcccgaagtggtacgccatggctgcggaagatatccagcaccagaccgccaatcagctggctggcgaccagtactgcaatagttgtcgccgctcccacattctgatatccgctgatactggcgaagacaaaaaacgatcccagcaagccaggtataagtgtccaccagcgcacgctggacaccagttcgccaaaccccgccatgccttgtttaaaccataaaatagaaacaaagagcacaatccccaccagtgagttcagcaacatggcgatgagaatggtagaggaggtctgggtgatgcgcaccatcagcgtgttctggactaccagaccaatcccggctgcaatcaaaaaggcaagggtaagtgactgattcatccgatcgcgtccggttcagtgcgctcgtcgagttgcaactgcataaatgtcagatccagccagcgcccaaatttagtgcctacctgcggcatttgcgcggtgacgacaaatcccagcgactggtgcagatgcagcgaggcctgattttgcgattcgatcccggcgaccatgacatgcttcccgcaatcccgcgcttcatcaatcaatcggcttaacaatttacgccccagacctttcccctgatgatcgggatggacataaaccgaatgttccacggtatggcgaaaaccatcaaaactacgccagtcgccaaacgaggcatatcccgtcactacgccatcttcttcactcaccagcaccggataacctgctatggtccgcgcttcaaaccaggcaatgcggttatccgcatccaccgtttggtcattccagatagccgccgtatacaacacggcgtggttataaatttccgcaattgcagcacagtcggctttgcgggcaaaacggatggacatgtctggcctcgataaaataatgatgatgatgttatcaatactatcgaaaacagcccgaagcaacggattcctctatgaaattattgcgtgttgcagaggggatgtgacggctgcaaacaaaaccaatcctgtgagcctgctactattgatggattcatgccaaaagcacaggagagcattatggggcaacaaacgcagcgtaaccgatgttgggttctgtccttgcgtccgcatggcgcgccggttccttacgtctggtttcggtaaatgcgctctttgtcgcaccagcgcaagcatttacagttccggaagtgggaaaacgtcaattaaatgaaatcaatcggatccgctacgaactggaattaatggcagttgctctggctgtcgaaaacctcactatgcaaaaaaacgttgctttgttgtgccaacaatacagccgataaataaaatacgcccggcaaataccgggcttaaagataattactcaaatcgccacgcaatatttatgccgacaccataatttcgtccgggcgcaggttcgtaatatcgcccgtttgactcattgacaatgacagagccaacgtattctttatcgaataaattatcgacacgaccaaataaatccacggtaaaattgtggtaattgtatttatacccggtgaataagccgacgagtgtataagaaggcgctttggccgtattttcatcatctgccataatatcgcccatataacgcgcttccgtgcctgcataccaaccatcttccggtatataacctatcgacgcaaagcccatattacgggcgatccctggcatccggttaccgttacaatcctgttcattgcacacattgctgcgataggtcgcatcaagccaggtccaggacgcttttacgcgaaaatctcccgcgaaacgttgatcccatgccagttcagcgccttgacgacgggtctttccggcatttttgtaagtcgtacgcccaccgctactgctatcgacaacaatttcatcatcggtgtcggtctggaacaatgcgagactaagcagcccatcaccaatacgcgttttactgccgatctcaattgtatcgttggtggagggttttaacccaaagttcataccgctttgtccatcagcacgataagacagctcattaatcgtcggcgtttcaaaacctcgcccgtctgccagatagatattccaggcatcggtcattgcatattttaacgaaccggcaggtagccatttgtgataactggcatcaccgctgtcatcgccgttacccggagtaacgtaatggtcgttggaatcaaaccacacggagctgtagcgcacgccagcatccagcgacagtttttcgctcagctgccactgcgtctgtaaatagggatcgacgttccacatcagattgcgttcgtcgcggcgcaactcacctttttgcccgtattccggcacgccgctattcaggcggaagttattgtagcccttgcggttttcactcatgttttcgtagttcaggccggtagtgaacgtgagcggaacgcccagttcaccacggtgtgtccagcggctgtctatcccctgataatggcgttgcagagtaatcacgccgcccgcatgtgacgggttaagttggggagccatcgggattgactggtactgggtcgtttctcgctctccggcatacatcatcacactcatatcatcttgcgcgctcaggctacgctcatagcgcaacccagcctgagtttgcttgatggtttttcgcgtgtcgtactgttctgcacgaggcgcttgttgtggattcgccttccattctgctttggttagcccacctgggtcatctgctttgatatccacactattgaaaatcaggcttaatttgctggcgtcatcaatgcgtacgcccagtttggcattggctaaatttttctgtgcgccgctatggtcacgatagccgtgggtcgtaaaacgtgtggttgagacggtgtaatcgacatcgccgggttgtgtgccgtcgcccgttgcgcccgtagctttcagcccatagcgccagctgccaaaactgccgtagtaactactggcttcaatggttggtggctgttgtccggtctgggtggtgacattcattacaccgccagacgcgttgccatacagagcagagaaggggccacgcagcacttccacattttgcacactgcttaaatcgatgttagatgtttgcccttgtccgtcgggcatggtagcgggaataccgtccacatacaggcgaataccgcgaattccgtaagtggagcgggagccaaatccgcgaatcgacagctgtaaatcttgcgcatagttctgccggttttgtacctgtaaaccaggcactccggtcagtgattcagacaagttaatgcgcggtgttgccaggcgcatctcctcgccattcaccacgctcacggctgctggggtatccagttctgaaaccacctgcggtgcggcactgacaatcatggtctgttcatcagcggcaaaaacaacgggggaaaggacaagcagtgcgggcaaaacggtctgtcggacggaaaaaatcttcatgaaaaaagccaggttaagaatgggaaaacaccgtcatggtaatgaaattgtaaatttatggaaaactaaacggcacaatacgttaagtaattgagaaaattgtagtcgtaacggtaagaaatgctccacatttgagaaaataatgattaccattcccatttataacaagggcgtaacgatgattacgcttagcgaagcattgtgaagcagcaaaaatatcggttcatcaaagggagtcgtcatgcatttacgtcatctgttttcatcgcgcctgcgtggttcattactgttaggttcattgcttgttgcttcatcattcagtacgcaggccgcagaagaaatgctgcgtaaagcggtaggtaaaggtgcctacgaaatggcttatagccagcaagaaaacgcgctgtggcttgccacttcgcaaagccgcaaactggataaaggcggcgtggtttatcgtcttgatccggttactctggaagtgacgcaggcgatccataacgatctcaagccgtttggtgccaccatcaataacacgactcagacgttgtggtttggtaacaccgtaaatagtgcggtcacggcgatagatgccaaaacgggcgaagtgaaaggtcgtctggtgctggatgatcgtaagcgcacggaagaggtacgcccgttgcaaccacgtgagctggtagctgatgatgccacgaacaccgtttacatcagtggtattggtaaagagagcgtgatttgggtcgttgatggcgagaatatcaaactgaaaaccgccatccagaacaccggtaaaatgagtaccggtctggcgctggatagcaaaggcaaacgtctttacaccactaacgctgacggcgaattgattaccatcgacaccgccgacaataaaatcctcagccgtaaaaagctgctggatgacggcaaagagcacttctttatcaacatcagccttgataccaccaggcagcgtgcatttatcaccgattctaaagcggcagaagtgttagtggtcgatacccgtaatggcaatattctggcgaaggttgcggcaccggaatcactggctgtgctgtttaacccagcgcgtaatgaagcctacgtgacgcatcgtcaggcaggtaaagtcagtgtgattgacgcgaaaagctataaagtggtgaaaacgttcgatacgccgactcatccgaacagcctggcgctgtctgccgatggcaaaacgctgtatgtcagtgtgaaacaaaaatccactaaacagcaggaagctacccagccggacgatgtgattcgtattgcgctgtaatagatatggcgagggtgaaaacggaaagaattgcctgacttttatcacgccgcatccggcaccttcgtcagtagtctgaatttgcccggcacgtagccgggcaattttgcaattaactcgatgtttcaggcttaaacacaatttcctgtttttcttcatcttcctcgacgactggcgcagtgctgtgaatttcagcaacgcgtttgcgcacaccaaaccaacctataaccagcagaataccgataatcggcagcgccgcgatggtataagtcccgttcgggtaatcgaacgccatcagcaccaggacactcagtaaaaacagtaatgtcagccaggaagtgaagggcgcgccaggcagtttaaaactgacatccgctgctttgccttctttaattgctttacgcaggcgcatctggcaaacgatgataaacgcccatgaagcgatgattcccagcgacgcgaagttcaacacaatctcaaatacgcgtgacggcaccagatagttgaggaatacgccgacgacatacacaaccagtgtcgccagaatcccggcatacggcacatgctgacgactcattttcgccataaaactcggtgcggaaccgcccatcgccatcgagcgcagaatacgcccggtgcagtacagacctgaattcaggctggagagggcagcggtcagcaccacaatgttcataatgctgccgatgtacggcacacccagtttagataaaaacgtcacaaatggactttgccccgcctgatacgcgctccacggcaataacataaccagcaacaccacggagccgacgtaaaacagaccaatacgccaaatcacactgttaatcgctttaggcaccatggtctgcggatctttacattctccggccgctgtacccaccatttcaatggaggcaaaagcaaacactacgccctgaatcaacaccagcgcaggcagcaaaccatgggggaaaaagccgccattatcggtgattaaatgaaagccagtggtgttgccatccagcggctgaccactaccgaggaacactgtacccacgaccaaaaaggttacaatggcgagcactttaataagcgcaaaccagaactccatctccgcaaaccatttcacaccgatcatattcatggtgccaacgatggtcagtgcagcgagcgcaaagacccactgcggcacgccgccaaacgcgccccagtaatgcatatacagagcgacggcggtaatatcaacaatccccgtcatcgcccagttgatgaagtacatccagccagcaacataagcggccttctcacccaaaaactcacgggcataagagacaaaactgccactggaagggcggtgtaacaccagctcacccaatgcacgcagaataaaaaacgaaaacaggccgcagatcaaatagaccagtgccagtgcgggccccgccatttgcagtcgcgcccccgcgcctaaaaacaaacccgtaccaatcgcgccgccaatggcgatcatctgtacctggcgattgcccatcgctttgtgatacccctcttcgtgggcattaagccagcggcgtttcgcggcgtgctgatctgaagtgtcggtgtcgtgtttactcattgctctccctgattgctttaatgaaaaagtcatataagttgccatgaacaatgtttattcatcctggcgatgatagttatcaccattattctttatgggtataaaactatcggcgcagcatcctacccgttatcgataaacgatgcaaaacatccccttacaatcctgaaggggatttatacaactgacgaaaaaatgataaatccttttgctggataacctgtgtgctgtcctacacttaatctttaaaagattgtgaggggcatatgattaaggtgtatagcgtacccggctggggctctacaatcagtgagctgatgctaacactggctgatattccttatcagttcgttgatgtcagtggttttgaccacgagggaacttcacgcgatttattaaaaaccctgaatccgttgtgtcaggttccgacactggcgctgtaaaaataacgagattatgacggagacagcggcgattgcattgatggttctcgatcgtcgcccggaccttgcgccacctcttgggcgcgccgaacgtcaatagtttcaacggctattggtctggctggttgctaatgtctatccaacgttcactttcgccgattaccctaagcgttgggcatctgacgcacctgaacagttaaagaagagtgtaattgaatatcgcaaatcgctttatatctggctgaattcgcaattgactgctgaaccgtatgtgtttggagagcaactaacgctggtggactgttatctctgcaccatgcgcacatggggaccgggacacgaatggtttcaggataatgccccgaacattaatgcgattgttgatgctgtatgtcagataccgaaattacaagaagtattaaaaaggaatgtcattatttaacaataatgccggaggttaatgttaatgaatcactggcgtagttaactggatatccatttgtttgctatgaatagtaattaaagttggtacaactatttatatgattgatgtaatttcgttttttatatgaaatatcaatttaatataatccgaaaataaaacatcttttcgcatgtagagaaacatgtcgatatgatagtgcagtgcagatcatgtcatcagggtagggcggtagcgtatttaatcagggaaagattacgcaacgctgcttttttgtactgaacgattctcattttatgtttaaaaattgagatactccttatttcctgaagctgtttttcattgcttatacatgatcaaatactccttacataattaaggagaacaaaatgaaacttaatacacgccaacaatttgtattacttaaatagaccagtgaaggtacgcatcagaatatccggtgaagtgattaatatttcgttgaatatttctccggatttttgaaacctgctgctgtagaaattctgaacaggaggaattatgcctttagcagccaaacttaccgacaaaggcacccagcacgacggttattacgagaccgtcatcaccgccgggtcatccaccgtttttattgatggcctccccgcagctcgtcaggaggatccgctgacgccgcatgataaaccgaagcatccccctcatccccgtaaaatcgccagaggctcgtcaaccgtctttattgacggcctgcccgccgccagaaccggtgatgctattgactgcggcggcgtggttattggtggcggtacggtaaatataggctgatatgtctgagaggtatttatgtccttaaaaggtcttcgctttacgctggaggttgacggccaggagccggacacctttgcagtgttgagcttccggttaatccagaaccagtcttatccgtttgtgatgagtgtggatgtcgccagcgattcttttatgcagacggcggagatgctgctggagaagaaggcaacgctgaccatctggcagggcgtcatcccgcagcgttatgtcacaggcgtggtggcgggctttggcatgcaggagaacaatggctggcagatgcgttaccacctgtgtattgagccgccgttatggcggtgcgggctgcggcagaacttccgcatcttccagcagcaggatatccggacgatatcggccacgttactgaacgagaacggcgtcacggagtggacgccgctgttttatgaggaccatccggcgcgggagttctgtgtccagtacggggaaagcgacctggcgtttctggcgcggctgtgggcggaggagggtattttcttctttgagcggtttgcggcggacagtccggagcagaagctgacgctgtgcgacgatgtggcggggctgtcacaggcgggagagtttccgtttaacccggacgcatcgacaggagcggagacggagtgtgtcagtatgttccgttatgaggcgcatgtccgcccgtcgtcggtgcagagccaggattacacgtttaaggtgccggactggccggggatgtatgagcagcagggtgagagcctgaacggacagcttgaacagtatgaaatatttgattatccgggaaggttcaaggatgagcagcacggcaaggatttcacgctgtaccagatggagagcctgcgcagtgatgcggaaaaggccacagggcagagtaattcgccgaagctgtggccgggaacgcggtttacgctgacggggcatccgcagaagatgctgaaccgtgaatggcaggtggtacagagcattctgtcaggagaccagccgcaggcgcttcatggcagccaggggagaggaaccacgctgggaaatcagttagaggtgataccggcggaccggacctggcgtccacgggtgcagagcaaaccgaaggtggacgggccgcagagtgcgatagtgacggggccagcgggagaggagattttctgcgacgaacatggtcgggtacgggtgaagtttcactgggaccgttatcacgggatgacggaggagagttcgtgctgggtgagggtgtcacaggcgtgggcggggccggggttcggtaacctggcgataccgcgtgtgggtcaggaagtgatagtggacttcctgaacggggacccggaccagccgataatcatggggcggacgtaccatgaggacaaccgttcgccggggagtctgccggggacgaagacgcagatgacgatacggtcgaagacctataaaggaagcgggtttaacgagctgcgctttgaggacgccacggacaaggaagaaatctacctgcacgcccagaaaaatatgcaggtcgtggtgctgaacagcaaggataagcgggtcaactatgaccgggcggtcagcatcgggcatgatgaattcctggtggtggcaaatgaccggaaagtgacggttgaaggtaaacaggaccataaaaccaccaaagaccacgtcagcctgacagagggtaatcagggactggaggtgaaaggcgatctggcacagaaaataagcggcgcgctgggtatcagcgtacagggcgatattgttttacagagcgacagcaaaatcagtctgcgggtgggaggttcatttgtggtgatccattccggcggcgtggatattaagggcgcgaaaatcaatcttaacggcggaggcagtccgggagacgtgatcctgccgatgcgcccggtgatcctgaaagccgcagccgggagtggttcgatgtttgtggcgcattgcccgaaggaggataagtgatggaaacggcacccgtaaagtacgctattgtggatggtgctgtggaggaaggattgctggattttctgaacgaagtgaatcccccacactgctgtctgtatgcagaacccatacagccggatctggtcgcgctggccccctatctcgtggaagttgttccggaggttgaagcatggctgagagataaggcgtcgccatggggaatatatctgacttctgagtcatccatgcgtgagctacagcaacacttcagacgttatctgtgggttaggatccccgaacaggagaaacctgttctcatgcgattttatgatccccggaatatatgggtattagcggaagttcttaccccccgccagcttcttttttttatcaaccccgtcagacagctaagtacccgctatggtgaagaatatcgtgaggataatttttcttccgtccgtcccgcagaaactatgaatataagggcagaacggccatcacaactgatgctgagttacagacaatatagccaactggaacgaaaggcacgggataattatcttgatacattatctgtatttatcgaagaaaatgcagaaaaagaagggtgggatgattcatcaaaagctgaatcatcccgaattctggcagaagattatttctctttttgccagtcattaaatatagcagatgatcgttccgtcagaacaatgacgcttatcttactgaaaaaaaacataatcgatctccgatatattccggatgactggtatgaactactcagcaatcagtcatatccgggacatattcgggtacatgaacttgcacaacaggaactgggatttatcccgcaataaaaagacaaacggatagattatatgacatctccatcttcgacagccggaaagccttgtgtggaatgcggcatacctgatccatgtatttttgatgttattagtgattttccagaggccggcgagaaacatttctggtcaaaagaaggaatggcgcgttttaagctactggacgatggttttggatgtgatggtataattaccattacctaccagtgcgacaacagtgggacacatgaggcatggttagaggaagaatcagaaaacagtcgtaagatactgcaaccttttggaaaacccaataatgttacattatattatgaaggtttcaagggtggaatgaatatcattgatgcgtttcattctccgtgggagtatctgagttcaattaccatgccacatgatgttctttatgaaccagcacattacacagtcagaattgatagctgttacgagcacaactcctatgtcgagattaaggtttatccttcattagaaattcggtttaccacagggcttagttatgagatttcgtcatcacaacagacacgagcggtaaaagatcgacgtgatgaacggagaaaagctcgggaggcgatggaagatacaaaacctaaagataaaaataaactacgaagcggatggacaaatacaaccgctgagtttgagttgtttcacaagacatctcttaccgttgaactgggattaaaagtcgctaatgttgaatatacacacaagtatgtagaggaaataaaaaaactcagacaaataaaacaactggagcagatgagtagaatagatgcgctgattaaaagcattaacaaatactttgcgccagatcctgacaacaaagatggtacgcgtaaatatgcgttattcagtgcaaaaatagaacctgtcacactggggatttcttatgcttatcaatacactgatattaaagatggtccgtgccatttttatggtctatatggtgctccatttttcaaagcatcattccgatttgatatcatctcatttatatgtgcatactgcaaaatggaagatctggtaaaccgatgccgtgaatatctccgcaagcatggaaccagtgttgaatgctatatcgaaatttcaccggaagttaatctcgatcttggggctgtatattctcaaaaagataaagcatgggaatttaacactaaagaaagcaatattaaacttggtttgaaaggtgaggttagtgcaacatttgagacgaatgtttttgtcgtgaaattgaaatctgaggttggtgcttctatagaagcaaaagctgggtttggatttgataaacgagatgatggaatggatcttgttctatttcatgatggagtgacgggcgcgtttaaagttaaggttgacatatctcgcggtgataaagatagaaaagagaatagtgagaaacccgaaaaagaaaatgaacttaagtggcaactatgtaaacctttggaagtagatgactcaccattacggattaatttgtatggtaaggaaaatactgtggaaaaaaaagtaacgccagtgacgcagtggcagataggcactgattattgaacggcgaagaatgaatcaaattaaagataataaggtaattatgaaaataaaaaatttaatatcagtcattttactatcaggaggtattatggggactggattgtactcgagcgataaccatcaaaaaatccgcagcaggtttaatatacaggaatcatattgtgccattaagactaatggtgtccttggattcagcaaccgaaaggatgtattgcgagaaaatggtgattcaaccggaaccaccagttccagcactaatgccatgatgctgatggaaaatggtgaaaatgaaatcagtctggagattggggcgttaaggtggttttctgataaacctgccagtaccgaagaacgagggcatttctcccaaaaagcagggtgcagtctggatttggttcgttttgttaagcaggaagaaaccatactttcttcgataaaggtgaccatcaaccagcagggaatacctgaagcgcagccagacagcatgcatcctgttatccgaaaagagattctggctgagcaggcagaacccggatttattgatccagactattttaatgaaacttatttcccgaaagggatgaaggtgtatcaatttacacaaaaggtctcggtggcggggcttcctgaatgggcctggacgcgagctacgccctttaccggaagcgatgaacagttacagaagctaaaagcagcctatatcgaaatggctgcaattattagcagcggggacagggcacgtctgaaagcttctcacaaagaggcactgaaagcctggtcagtcacaaccggtgacagtgaggatgaaatattgctctcgctctatccaaaagaagaaatagaaggcaggaaagccagaatgcagcccatcagatggggcgattacgctatccgggttatgaataatggacgtatggtgcagctatataataaatcgaaaccaacatattctccgctgacttatcgtttcatagatgaagatggtgatgaagttatggggtattacgctccggtattttcgctgattgatggtcagtttatccctgtcacttgattaacctgttgggctacaaatcaggatgtccggtaaggtgattattgctgagttaagcaccttaccatttttttaattttttgtcgctgatattccagacaggaaaacaatatgcctttagctgccagattaaacgacaaaggtacccagcatgatggctaccgtgagacagtcatcattgcggcttcatcgacggtatttattgatggattacctgccgcccgccagggagatccgctgacgccgcatgataaaccgaagcatccccctcatccccgaaaaatcgccagaggctcgtcaaccgtctttattgacggcctgcccgccgccagaaccggtgatgctattgactgcggcggcgtggttattggtggcggtacggtaaatataggctgatatgtctgagaggtatttatgtccttaaaaggtcttcgctttacgctggaggttgacggccaggagccggacacctttgcagtggtgaatttcaggttaatccagaaccagtcttatccgtttgtgatgagtgtggatgtcgccagcgattcttttatgcagacggcggagatgctgctggagaagaacgcaacgctgactatctggcagggcgtcattccgcagcgttatgtcaccggcgtggtggcggggtttggtatgcaggagaacaacggctggcagatgcgttatcacctgcgtattgagccgccgttatggcggtgcgggctgcggcggaacttccgtatcttccagcagcaggatatccggacgatatcggccatgctgctgaacgagaacggcgtcacagagtggacgccgctgttttatgaggaccatccggcgcgggagttctgtgtccagtacggggaaagcgacctggcgtttctggcgcggctgtgggcggaggaggggattttcttctttgagcggtttgcggcggacagtccggagcagaagctgacgctgtgcgacgatgtggcggggctgtcacaggcgggggagcttccgtttaacccggacacatcggcaggagcggagacggagtgtgtcagtatgttccgttatgaggcgcatgtccgcccgtcatcggtgcagagccaggattacacgtttaaggtgccggactggccggggatgtatgagcagcagggtgagagcctgaacggacagcttgaacagtatgaaatatttgattatccgggaaggtacaaggatgaacagcacggcaaggatttcacgctgtaccggatggagagcctgcgcagtgatgcggaaaaggccacagggcagagtaattcgccgaagctgtggccgggaacgcggtttacgctgacggggcatccgcagaagatgctgaaccgtgaatggcaggtggtacagagcattctgtcaggagaccagccgcaggcgcttcacggcagccaggggagaggaaccacgctgggcaatcagttagaggtgataccggcggaccggacgtggcgtccacggcagcaaagcaaaccgaaggtggacgggccacagagcgccattgtcaccggtcccgcaggagaggaaatcttctgcgacgaacatggtcgggtacgggtgaagtttcactgggaccgttatcacgggatgacggaggagagttcgtgctgggtgcgtgtgtcgcaggcgtgggcggggccgggatttggtaatctggcgataccgcgggtgggccaggaggtgattgttgattttctgaacggggacccggaccagccgctggtcatgggccggacgtaccatgaggacaaccgttcgccgggggacctgccgggaacgaagacgcagatgacgatacggtcgaagacctataaaggaagcggttttaatgagttgcgctttgaggatgcgacggataaggaacaggtctatatccacgcgcagaagaacatggacacggaggtacttaacgaccggacgacggatgtgaaacatgaccatacggagaccatcgggaacgaccagaagataacggtggtgaaggggcagacggttcaggtcgggaccagaaaagaagggggccacgaccagagtatcacggtggcgaatgaccggcgcataacggtacgcaacgaccagacgctgaaggtgacgaacgaccggacggtgagcgtgagtcatgatgacggcctgtacgtcagaaatgaccgtagggtgacggtgaaagggaagcaggagcataagacgacggggaaccatgtcagcctggtggagggaaagcacagcctggtggtgaagggggacctggcgaggaaggtgagtggcgcgctggggataaaggtggacggggaaatcgtgctggagagcagcagccggataagcctgaaagtgggtggttcgtttgtggtcatccattcagggggcgtggacatcgtcgggccgaaaatcaatctcaatagcggcggtagtccgggaacgccggtgccgacgctgcaaccgacggtgctgaagacaccggggggtgagaagagtggtgatggcagtgactccggagaagaaaatgaagaccctggagggagcggcttggccggaagtggtggtggtgatcgaggtgacgatgaggatgaacctgaaaaatatactctccagttccattttacagacgatgacgggataccgtattcagaaatacgctacattgccttctttgaggacggtgcgcagattcgcggtgaaacggacaaggacgggtatacagaagttttctctagaaccaatgatgcaaatgtagaaattaaactgttaactaatgattattatatatttgaggtgaattgtaatgagcaccagtaataacatgggtagaaccacacaggctcaaccaaagcccggtgtaaatgtctgcatagtaaaaaaagaaataactaataaattcaatgagattattaccaatgctttggctgaacaactagttgttttaaataaaagaaaaaaagacttatatagatgggaggagacagaaaaaaaagaatttcttgatatttttgggagaaatgagattgaggctaataaatggctgctgagaggcgttgaggcaatgatattagtcaatcagagagtgaaaagcaattgttttaaatatcaaggtgatgaatgtatttttgccaaagtgcagggagggattagtagtgagaatcctgttattgtaggccctaaattttttcatgccgcggttaaaggatacgattcccaggtatccactttatgtcatgagttttcacatttaagcgaagttctgtatactgacgatttaagccctccgggtaaaaatgcggaaacaacatctgctgaagaatacagagagcatgcggaaaatcttgtaaaagctaaaagtcgagatgtaatgataaatggatataacattgaacgttacttcgaataagattattcattgcctttatatcacaacctttacgctaatgtttttcagcacaaatttgaaaggtgaaaattatttaatacccaaaaaaaatgcttatggatcgttagtgttcgcagaaaagaagcatgaacatccgggtgtttatgatttatttcaatcaaacaaattcattacaaaagatacgacatactttgatctaactcctgattatgcaatgagtaaaaatgaaaatattatattgcaacaagaaaatcaagttttcttgactctttcagttgaaagtgtcaaaaaaaatattatagcgatagttaatgtttataatgctcatgatggctatttgtatatttataaaaagaatataccttataatggtaaggatttatgtgataaacgttttttaattacatcatatgatgtaattctcgattatctgggaggatggtgtaattatggactggatatgtcatcttctgcgtggcttgagataccacctaaaagcaattatacatatcaagttaatttaaatgactactacgtttttttaccaggcaagcatcgctataacgttggtacttttgagcatcttattgtaagaagtaattggttcaggaatgaaaatataaacacggcaatgtttaatattttaaaccaaagtcatcctaagaaaaaaattgatgatttattatataatcttgatctctatggggcaagactaggtgtctttttgagaagcaatgaagtttcgttattaatcgatggggatgaacttgactctctttatagcaagtaagcaaaaatacataatggtaagccatcgattgatacctggcggtagtttaggcgttaattattgggcggataaaggatgtagtttgtcacatgccagagaagttacacggcgaataaacccagcagcagatggcttcgatttagtacgttggccagcatttgagcattcttgatatgtattgaatgatgaaataacccccccacttaattacataaggattgtttaaaacaatggggtttagaaaaacaataatcacttcggtaggtttgatatttatttcattctcttttgtggcaaagtgctctcaactcaaaaatttgaataattactcagtgatgctttgtggaaaagtgtcaaataatatcctggatgatattggtggttataaagaaagaaatatattaatgctgcgagctataaaaaaatcataataatgacaatcgtaaatattatatttttctattcctttcaatcgactgcggatgaaatggttttaataaaaaaatacgggtttgggcttgagagagatatcaaaggaaggccattaatttatcctatcgaaaattatgatgagtgtaagaaaaaatgcaatcatatgaattatatagcggatgtcaatgctcaattagctatgagtaaaaaaaataacaggatttttgctaacataacctttactaacaatagctctaccacgtattttttttctaaatattatctacctatgaaagtaaaagatggaaaaggagatgaatatgatgcgatatgcaaaaaaccattcagaatcaactctgggaatatcacgttggactacttaggtggttcatgtccttttgaaattaatacgaatcctgaacggtggaatactattaaaccaggtcgtagttttttgttgagtataaccttaaatgatatgtatgcctttataccaggagataattattattttataaaatcatctggctataaatttgttaatgacaagtggtttacactcaaatcaatcaataatatttttctttattttttaaatttaaaaattaattgtgctgatgatttttttgatattaataattttactacatgtaataatttgttattggatgaaaaaaacacttttttattaatcagttatgggcaattgaggatgaaaaaaattctatttacgtcacccctgatgaaatttctataagtatagacggcgataacttaaagttgccatattaggaatatgggaaagaacacggtgcgccgcttttttgcactaaataatttacattttatgttcaataattgatactaacatgttggatattaaaggtgaaattatcacaactgatgcgatgggttgccagaaagatattgcagagaagatacaaaaacagggaggtaattatttatttgctgtaaaaggacataaggagcggattaataaagcctttgagtgaaacttccgctgaaaattcaggttaaccgcgttccatgcaaacaattttcaaatattcatcaataaataaggagttccatgtttatacgaccagtcaaaccttcagatgttgaaccattaatggatatgctgcttgacagggatcaatttgatcaagatggccttcatcatgtacaaaaaacactaacacattatttctcaggtcaatctgccgatttatggtttagtgcagaacacttgggactggcagggattgcctactgtgcttctgaaatgatgacaaatgatgtctgaaatttattaatgctctggatcagtccttcccatcagcgccagggagtgagacatctgctgattaacgaaatagaaaagagctcacaattaaacaggcaagactactattagtagagaccgccagccatatcgattttagtgccgcccgcgcattttatacaaaacagggctttatcaatgaggcgataatacgcaattactatgatgttggtgaggataaattaatcttcactaaaaatatgcaatcgtgagataaaatatgctttaactcatatggaaacattgcttaaacaacttggttgctgcatatgattctttagcccgccgtaactcgcttaccactggtaacaaacgtgccagcacctaaatgatgcaacgtattgagcttatcatcatcaaactgccagcggccttcgacaaatacccgtgcgtctgccgctgctgataccacttcgccaaatagcgtatcgtatttttcttgcgcggaagttgcaggtagcaggcgacactccatccacgccagacatttttcctcgaccagcggcaaaccaagcaccgggcctctcactaccggaatgccgtagcaattaaatttatcttcttcacgacccgacacacttcccaccgcccacgtccagttagtcgccgcaacgcccgggataacgatgccaaacttaccgttacgttcaatcaactccctggtccatgtcgatttatctaccacaatcgccacgcgtggcggttcaaactctacgggcatcgaccaggctgctgccataatgttacgccgctgggattgctcatcgaaactggtgatcatgacagttgggccatgatttaacagacggctggcatggtgtaattcgacgggaatgaattggctcacgatatcgcctcgctatgaagggtgttttaaaagcgtagctcgtaacgcaataagtaacgaaattaacgggattggcgatttgcgaacgtgatgcatgtccgcgatcgcacaaaatagccagtgcggcgtctattccaggttataagttgagaaaaccactaagggaaacgcctgatgacgcccattctgaatcattattttgcccgtattaactggttgggagctgctgcggccaatattgatacgctgcgtgcattgcacctgaaacacaattgcaccattccgtttgaaaatctcgacgttttgctgccgagggaaatacagcttgatgatcaatcgctggaagataaactggtgatagcccgtcgtggcggttactgttttgagcagaatggcgtgtttgagcgggtgttacgcgagctggggtttaacgttcgcagcttgttaggtcgcgtagtgttatcaaatccgccagcattaccgccgcgcacccatcgtttgctgttggtggaactggaaggggaaaaatggattgctgatgtcggtttcggtgggcagacgctaaccgcgccgattcgtttaatgccggatatcatgcaaaccacgccacacggagagtatcggttgttgcaagagggtgatgattgggtattgcagtttaatcatcatcagcactggcagtcgatgtaccgttttgatctctgcgagcagcaacaaagcgattatgtgatgggcaatttctggtcggcgcactggccgcagtcgcattttcgccatcatttgctgatgtgtcgccatttgccggacggtggcaagctaacgctgaccaattttcattttacccattatgaaaatgggcacgcagttgagcagcgaaatctaccagatgtggcgtcgttatatgccgtgatgcaggaacagtttggtctgggcgtagatgatgcgaaacatggctttactgtggatgagttagcgctggtgatggcggcgtttgatacgcacccggaggcgggaaaataatttatgtcaggttgccggatgtggcgtaaacgccttatccggcctacattagtccggttgtaggcctgatcagcgaagcgcatcaggcaacggcatcaaaaatcaatggcccattcagcatggaatagaatcaccgccgtgccggaaatggtaactttctccggttggttatctcgaattgtcaccgtcacatcaattacaccatcacgccccaatgcgcgcccctgatggcctttaacacgcaacacgttgccatcgtgggataatacgttgtgatgtactaaccatgcgcccatcggaccattggcattcccggtcaccggatcttccacaataccaatcgcaggcgagaacatgcgaccgtcggtttcgcttttgcctgggcggatctggaacgggaagaaaccattgcagccaatctgcttgctgattgcggtcagcgcagcaaggtcaggcgaaagggcgtcgatatccacttccgacttcagtggaatcatcacttttgagtgtcctgttgttgccacctgaattggcaagcctggcagaatatcgtcctcagtgagatgaagcgcgttgataatcgctgcacgtgtttcaccttccagcggtggctcaaagcccggcgtaccttgttccagcgaaatacgataatcatcgttatgcttttcgatagtcacgcggtgttttcctgccagcgacgtttgccagaccgtgcaatttcccaaacctaatacctttgcacgtacatagtgcgcagccaccgtcgcgtgaccgcaaattggcgcttcaaccgttggcgtaaagtagcggatgcgcacatcgctgtcgtcgctgtgcagcagaaaagcagtttccgaatgacctaactcgcgggcgataagctgcatttgcgcttcactgagattatcggcggggaaaacaacaccggcagaattgccgcgaaacggttgagaggtaaaagcatcgacgtggtaaacctgcggtttcattaatgttctcctgtggctggagaactatcatagcctgcaagtggccggagagcgaagggctatccggcccgcgtgagaattaacgccgcgaacgcacaatctgataccgacgagtaaagtactcaaacggcgcgctccagacatgcaccagtcgggtgaacgggaagagcaggaagatggtcattccaagcaccagatgaacgcggaatataaaggcgacaccatcaagatgcgtagatgcaccgccctggaaagtgacaatgctttgcgcccagcccaccagcttcatcatttcactgccgtccggatgttgtgctgaaaaaggaatggtggttaacccaagaatgcactgaattaacaaaatggcgaggatcaggatatccgcaccagaagacgtcaccctgatacgcggatttgttaaacgacgcaccagtagccccgcaccgccaatcagcgtcaataccccgcatattccgccgaggatcatcgccatctgctgttttaccgccaccggcagaaaccacgcgtacatccagtgcggtgttaacatgccgaacaggtgcccgaagaaaatccccaaaatgccgatatggaacagattcgaccatatcaccatcccacgtttatcgagcatctggctggaggcggcgcgccaggtatactgcccgtaatcgtagcgcagccagcttccaaggataaaaaccgtgccacacaagtacgggtagatatcataaaaaaagacgttcagatactgaatcatttcccacctcccgcactgatgtcgacatactgcggcgcgacatcctggctaaagcgtcgctgatattgattaagcggcgagctgtcacacgccgtggcgttatcttcaataaacttcacctgttcctcttcccacaccgcatccagcgcctggcgggtgtcatcgcgctcctcactgttcacctgttttgtgacactgtcacttgaaagtgtacttcctgccagttgcaacagggtgtcaaataacgcgtaccacggtgcctcgcgttgttttaagcgtccgccaagcagggcgaggatcggcgcaacgttgagcaagccttctttcgcctgatcgtccggcagtacgcttaagtactccagatacagtggtagataatcgggcagttctcgacaatccaactgcaggccgaccttttcatactccgccagcaggtccaccattgcctggccgcgatcgcgggactcggcatgaacatgttcgaacagcagcagcgatgtggtacgtccacggtcaaacacttcgcaccattcggcctgtttatccagcagcggcgcgttaagcaggttgcgggtaaaatccgtaagcatcggcgcgtcgcggcggatcaacgccagcgcgtcctccttacattcccacaacagctcgtccggatattccatcaacaggccgatcactttgaggatctgcattattcgccctccgctttgtcgcgcacttcggtgatgttgatggcatcgatacggctactgttgaacaggttgaatttgctgtccgagccatggcaaccgtcgccaaaggtaaaaccgcagccgttgcgttcagcaaaggcatcgcccgccatttcccgatgactggttggaatgacaaaacggtcttcatagttggcaatggcgaggtagcgatacatctcttcgacctgggcgacgctcaggcctacttcgtcaatggcgcgggtatcggtaacgccttccacggtttgtgaacgcatatagtggcgcatcgccatcatccgtttcagcgcccgcagtaccggaccggtatcgccggcactcaacatattggcgagatattgcaccggaatacgcaggctttcgatggcgggcagcacgccttcgcttttcggcaagccgcccgcatcagcgtaagactgaatcggtgacagtggaggaacgtaccagaccatcggcagggtgcggtattcagggtgcagcggtaacgccagtttccagtccatcgccattttgtagactggcgaacgctgggcagcttcaatcacgttttgtggaataccttgtttcagggcttcttcgatcactgagggatcgtgcggatcgaggaacacttcgcactggcgttcatagaggtcaacttcgcgctcggtgctcgccgcttcctcaatgcggtcggcgtcgtaaagcagcacgcccagataccggatgcgacccacgcaggtttcggagcacacggtgggttggcctgactcaattcgtgggtaacagaagatacatttttctgacttgccgcttttccagttgaagtagatttttttgtacggacaaccgctaatgcacaaacgccagccacggcatttatcctgatcgatcagcacaatgccgtcttcttcgcgtttgtagatagcgccgctggggcaggtcgctacacaactggggttaaggcagtgttcgcacaagcgcggcagatacatcatgaaggtgttttcaaactgcccgtacatctccttttgcatggcctcgaagttgcggtcgcgggctcgtttttcaaattcgccgcccagcagttcttcccagtttgggccccagatcactttgtccatccgtttgccgtcaatcagtgaacgcggacgggctgtgggaatatgtttgccttccggcgcgctatgcaaatgttcgtagtcgaaggtgaaaggttcgtagtaatcgtcaatctgcggcactaccgggttggcgaaaattttggttattacgcccatcttgctgcccagacgcgggcgtatcttgccattcacatcacgcacccagccaccttgccactcatcctgatcttcccagtttttcggataaccaatgcccggtttggtttcgacgttgttaaaccatgcgtactccatgccttcgcgtccggtccagacgtttttacaggtcaccgaacaggtatggcagccgatacatttatcgaggttaagcaccatgccgacttgcgaacgtattttcattttttcgcctcctgaacctgatcgcgaccttcatcatccagccagttaacgttcttcattttgcggatcataatgaattcgtcgcggttcgagccgacagtgccgtagtagttaaagccccaggccagctgcgcgtaaccgccaatcatatgcgttggtttcgggcaaacgcgggtaaccgagttatgaatgccgccgcgcatgccagttacttccgaaccaggaatattcataatgcgttcctgggcgtgatacatcatggtcatgcccggcggtacacgttggctgaccaccgcgcgggcagtcagcgcgccgttggcgttaaatacttccacccagtcgttatcgacaatggtcagttctcgggcatcggtttcgctgatccagacaatcggtccaccgcgagagagcgtcagcattagcaggttttcactgtaggttgagtgaatgccccatttctggtgcggcgtcaggaagttaagggctttttccgggaagccgtttggcggtatctggcgcatttcactgacgctacgggtgtcgataggcgggcgataagccaccagactttcaccaaaagcacgcatccacggatgatcctgatagagttgctggcgtcccgacagcgtgcgccacggaattaactcatgaacgttggtgtatcccgcgttataggagaagtgatcgctttccagaccagaccaggtggggctggagataattttacgtggctgtgcctgaatatcgcgaaagcgaatcttctcgtcctctttgtgcagcgccagatgggtatgttcgcgtccggtgatctcgcccagcgcttgccacgctttgactgcaacatggccgttggtttccggtgccagtgccagaatcacttctgatgcgtcaatggcggtgtcaatcagcggacgcccctgtgccgggccatcacgcttggtgtaattaagtttaccgaggaaatcgatttcatcctgggtattccacgaaatccctttaccgccgttgccaagtttgtccatcaatggcccgagcgaggtaaagcgttcataggtagcagggtagtcgcgctccaccgccacaatattcggcgcggttttgcctggaatcagatcgcattcgcctttgcgccagtcgagcacttcacacggctgtgaaagctctgccggggagtcatgcagcagtggttgtaataccacgtcggtttctttgccgagatgccccacgcacacttgcgaaaaggctttagcgatacctttgtagatttcccagtcgctgcgtgattcccacgccggatcgaccaccgcagaaagcggatgaataaacggatgcatatccgaggtattcatatcgtctttttcgtaccaggtggcggtgggcagaacgatatcggagaacaggcaggtactggacatgcggaagtcgagcgtcaccagcaggtcgagcttgccttcaatcgccgcagtttgccactcgacttcttctggtttgatcccgtcgctggcaccgagttcctcgccctgaatcccgctttcggtccccagcagatacttctgcatatactcgtggcctttgccggaggagccaagcaggttagaacgccagacaaacaaattacgcggatgattgctgccgctatctggttgttcgcaggccatacgtaaatcgcccgatttcagcgcctgggcggtaaattctgtgggggataatccggccttgtcggcttcagctttcagggagagcgggttacgccccagctgcggcgcagaagggagccagcccatacgttcggcgcgaacgttgaaatcaatcaggtgaccgctgtatttactggcatcggcgagcggtgagagcaattcctgcgcggtgactttttcatagcgccactggctggagtgattgtagaaaaacgaggtgctgttcatctggcgcggtggccggttccagtcgagcgcaaaggccagaggcagccagccggtttgcgggcgcagtttttcctgaccgacatagtgcgcccagccgccaccgctttgtccgacacaaccgcagaagatcagcatattgatcatcccgcggtagttcatgtccatgtgataccagtggttaacacctgcgccgagaataatcatcgagcgcccatgcgttttatgggcggtatcggcaaattcacgggcgatggtttcaatatactggcgcggaacgccggtaatttgctcgccccaggcaggggtataaggtttgatttcagcgtaatctttcgcgctgttttcatcttccagcccgcgatcgaggccataattcgccagtaccaaatcataaacgctgacgaccggacaggtgttgccatcggctaatgtcaggtttttaacgggcaattggcgcaccaggaccggattgtgttttacgcggcgaaaatgcggattttcaatgccgccaaagtaggggaaggccacgcctgcaacggcatcatgttgaccgagcagagttaacgacaattcggtttccgtaccggcggcaatggattccagattccatttgcctttttctccccagcgaaaaccaatcgaaccgttaggcaccaccagttcacctgcggtattaactgccacggttttccactgcggattattgctttcgcccagtccatccaccaggtcagatgcgcggaccatgcgcccgggaacgtagctgccgtcgtcgcgaggttccagcattaccagcataggcatgtcgctgtagcggcggcagtagttgataaaataatcgctgggattatcgagatgaaactcttttaaaatgacatggcccattgccattgccagggcactatcagtgccttgtttcggtgccagccactggtcgcacaatttggccacttcagagtagtcaggggtaatggcgatggttttagtgcctttgtagcgtacttcggtaaagaaatgggcgtccggcgtacgtgtctgcggtacgttagacccccaggcgatgatgtaactggagttataccagtcggcagattccggtacgtcggtttgctcgccccaggtcatcggcgaggcgggcggcaggtcgcaataccagtcgtagaagcttaaacaggtgccacctaacagcgacagataacgtgttccggcggcgtaagaaaccatcgacatcgccgggatcggcgagaaaccggcaacgcgatccgggccgtaagttttgatggtccagacgttagcagcggcaatcagctggtttagctcctgccagttggagcggataaagccgccgcgtccacgtacttgtttgtagctcaggcacttttgcggatcgttcataatcgatgcccacgccagtaccggatcgctgtgttgcttgagggcttcgcgccacagttcaatcagtcgtttacgaatgagcgggtatttcaggcggttagcgctgtagagataccaggagtaacttgcgccacgcgggcagccgcgaggttcgtgatttggcaggtcagggtgagtgcgcgggtagtcggtctgttggatttcccaggtcaccagaccatttttaacgtagattttccagctacaggagcctgtacagttaacaccgtgggtggaacgcacgattttgtcgaactgccaacgctggcgatagctgtcctcccagtcgcggttgctatgcatcacctgtccgtgaccatcggcaaaggtttcgcccttttgtttgaagtagcgaaagcgatccaaaagtttactcatgacataactcctgctccaggaatgaattgggatctgatgccttgtcggatgagacacggttgtagcctgataagacgtgtcaggcatcgatctcttatttttggctgaacttccgccgaccataaatcagccaggtcagtagcacacaaacgatgtagaagattaaaaacactttcatcgcgcccaccggagagccggtcatattgagcgacatgccaaacgcctgcggaataaaaaagccgcccactgcgccaatggctgagataaagcccagagcggctgccgtttcggtgacggcttctctttgagcttgctcatcactaccgcctttcatcttcacccgataaattgttatctggcgaaagatgacggcgatcatctggaaagtagaaccacttcccagacccgcggtcagaaacagccccataaatacggcgtaaaatgcgatgaaattaccggagcctgtgcccggtaaggtaaggaacagcagggcgctgaaaatcgccataaaaatgaagttgatcaacgttacccgcacgccgccgaatttatcggaaatagcaccaccaaccgatcgcgcgatggcaccgataaatgggccaaagaacgccaggcgcagaatattcacatccgggaactgggtttttgccagcatggcaaaacccgcagaaaaaccgataaacgaaccgaaggtggcaagataaagcaggctcagcagccagagatgcaggcgttgtaagacagggagctggtcggcaattgaggcgcgtgaactggcgatatcattcatccctgaccaggcggcgatcgtggcaatcgccagtaatggtacccaaatccatgcggcattcgccagcgacatcaccgaaccgtcggcctgcggtacgccattgacgccgagaaaggcaaatacggggacaaaaatgaccagcggtgcaaccagctgcatcacacttacacctaagtttcctaatccgccattaatcccaagagcgctcccttgtttggcttttggaaagaagaaactgatattgcccatgctcgaagcaaagttcgcacctgcaaaaccgcatagcaaagcgataacgataaatatcccaaaaggagtattcggattctgcacggcaattccgagccagacgcaaggaataatcaggattgcagtactaaaaaccgtccatcggcgtccaccgaatataggcaccataaaggagtagggaacacgcaataatgcgccagaaacggagggtaatgcggttaataaaaagagttgatcggtagtgaaattaaaaccgattttattgagattaacagtaactgcgctaaatagcatccagacacagaaggcaaaaagtaggcaactgactgatatccagaggtttcttcgtgcaatatgctttcctttattttcccagaaggccggattttctggtttccagtcgcgtaaaagataacgactatttttctcattttgcagtgccatattgttcctcacatgcacacattggtaatgaaaaaaagacaaaacaggaggtaaggcgcaatagccagttattagaattaaggatgaatcaggtgaagtgctgattagaagaatagataagaaagcgtaactgcgggggcagaatgtggattaaacagacagatatgtgttactaaatgtaactaaaatggctttctggtatttgaaatttattttttaatattgtcagaatttatctgattaactgccgggccgtagacccgacaattattttagccacgacgtgtcgccagccagcagagcagggaaccgccgcagaccattagcgcgccttgccagaacgagaacgacagcggggcgctgagtaacacggctgcaagtgctgaggaaaggacgggcgtaaaatacgaacctaccgccattatggtgacgttgccatgtaatataccgacattccatgcagcataagcaaatcctaaggtaaatgccgcagagatgagtttaatcatgacgggcgtgctaaataccatttctggttgtggcgtaagaaaatagtaaacccacagacttgctcccgttagcaggacaaaaacggtaattccgttaaatccacgtgcgtatttattcgttactgtgcagtaggctgcccagataaacgccccaatgaacgccaggaaataactcaatgggctggtggtgatattattaataatttgatcataatgtaacccattgtcaccgcctaacacccagcagacgccgaccagggctaataataatcctggtacaatcagccagttggttttctgaccattaaacagaatggcaaagagaattgtcaggctgggccatagatagttcaccatccccacttcaatcgcctgatgacgggtcgccgcataccctaaggaaagcgccagacagatttcatagctgacgaataacagactcccggcgagtaaatagcctttcgggatctgccgaatacgcggaaatccaaccgtgaagattaacagcagcccgcttaatgaatagatagcagctgcgccgccgaccgggccgagtccctcactgacaccgcgaatcaatcctaccatcgtgctccacaggacgatcgctattagccctatgagcgttgctttttgtcgtgtcatgctcgctgttttgtctctcttgccgttaaaaattaagctgaattttatagcattttttttaactggcctgtcaggcagtggtgcgtttttctaccgctattgaggtaggtcaatttgcgcaggcggattattttgtggcaaacacgtgttctttttgatttcgcgcaaaaagattcagaattttactgttagtttcctcgcgcagtaatacccctgaaaaaagaggaaagcaatggacgtcagtcgcagacaattttttaaaatctgcgcgggcggtatggcgggaacaacagtagcagcattgggctttgccccgaagcaagcactggctcaggcgcgaaactacaaattattacgcgcgaaagagatccgtaacacctgcacatactgttccgtaggttgcgggctattgatgtatagcctgggtgatggcgcgaaaaacgccagagaagcgatttatcacattgaaggtgacccggatcatccggtaagccgtggtgcgctgtgcccgaaaggggccggtttgctggattacgtcaacagcgaaaaccgtctgcgctacccggaatatcgtgcgccaggttctgacaaatggcagcgcattagctgggaagaagcattctcccgtattgcgaagctgatgaaagccgaccgtgacgctaactttattgaaaagaacgagcagggcgtaacggtaaaccgttggctttctaccggtatgctgtgtgcttccggtgccagcaacgaaaccgggatgctgactcaaaaatttgcccgctccctcgggatgctggcggtagacaaccaggcgcgcgtctgacacggaccaacggtagcaagtcttgctccaacatttggtcgcggtgcgatgaccaaccactgggtggatatcaaaaacgctaacgtcgtaatggtgatgggcggtaacgctgctgaagcgcatcccgtcggtttccgctgggcgatggaagcgaaaaacaacaacgatgcaaccttgatcgttgtcgatccccgttttacgcgtaccgcttctgtggcggatatttacgcacctattcgttccggtacggacattacgttcctgtctggcgttttgcgctacctgatcgaaaacaacaaaatcaacgccgaatacgttaagcattacaccaacgccagcctgttggtgcgtgatgattttgctttcgaagacggtctgttcagcggctacgacgctgaaaaacgtcaatacgataagtcgtcctggaactatcagttcgatgaaaacggctatgcgaaacgcgatgacacgctgactcatccgcgctgtgtatggaatctgctgaaagcgcacgtttcccgctacacgccggacgtagtagaaaacatttgcggtacgccaaaagccgacttcctgaaagtgtgtgaagtgctggcctccaccagcgcaccggatcgcacaaccaccttcctgtacgcgctgggctggacgcagcacaccgtgggtgcgcagaacatccgtacgatggcgatgatccagttgctgctcggtaacatgggtatggccggtggcggcgtgaacgcattgcgtggtcactccaacattcagggcctgactgacttaggcctgctctctaccagcctgccaggttatctgacgctgccgtcagaaaaacaggttgatttgcagtcgtatctggaagcgaacacgccgaaagcgacgctggctgatcaggtgaactactggagcaactatccgaagtttttcgttagcctgatgaaatctttctacggcgatgccgcgcagaaagagaacaactggggctacgactggctgccgaagtgggaccagacctacgacgtcatcaagtatttcaacatgatggatgaaggtaaagtcaccggttatttctgccagggctttaacccggttgcgtccttcccggacaaaaacaaagtggtgagctgcctgagcaagctgaagtacatggtggttatcgatccgctggtgactgaaacctctaccttctggcagaaccacggcgagtcgaacgatgtcgatccggcatctattcagactgaagtattccgtctgccttcgacctgctttgctgaagaagatggttctatcgctaactccggtcgctggttgcagtggcactggaaaggtcaggacgcgccgggcgaagcacgtaacgacggcgaaattctggcgggtatctaccatcatctgcgcgagctgtaccaggccgagggtggtaaaggcgtagaaccgctgataaagatgagctggaactacaagcagccgcacgaaccgcaatctgacgaagtagctaaagagaacaacggctacgcgctggaagatctctatgatgccaatggcgtgctgattgcgaagaaaggtcagttgctgagtagctttgcgcatctgcgtgatgacggtacaaccgcatcgtcttgctggatctacaccggtagctggacagagcagggcaaccagatggctaaccgcgataactccgacccatctggtctggggaatacgctgggatgggcctgggcgtggccgctcaaccgtcgcgtactctacaaccgtgcttcggcggatatcaacggtaaaccgtgggatccgaaacggatgctgatccagtggaacggcagcaagtggacgggtaacgatattccggacttcggcaatgccgcgccaggtacaccaaccggaccgtttatcatgcagccggaagggatgggacgcctgtttgccatcaacaaaatggcggaaggtccgttcccggaacactacgagccaattgaaacgccgctgggcactaacccgttgcatccgaacgtggtgtctaacccggttgttcgtctgtatgaacaagacgcactgcggatgggtaaaaaagagcagttcccgtatgtgggtacgacctatcgtctgacggagcacttccacacctggaccaagcacgcattgctcaacgcaattgctcagccggaacagtttgtggaaatcagcgaaacgctggcggcggcgaaaggcattaataatggcgatcgtgtcactgtctcaagcaagcgtggctttatccgcgcggtggcggtggtaacgcgccgtctgaaaccgctgaatgtaaacggtcagcaggttgaaacggtgggtattccaatccactggggctttgagggtgtcgcgcgtaaaggttatatcgctaacactctgacgccgaatgtcggtgatgcaaactcgcaaacgccggaatataaagcgttcttagtcaacatcgagaaggcgtaagggggcgaacagatggctatggaaacgcaggacattatcaaaaggtccgcaactaactccatcacgccgccttctcaggtgcgtgattacaaagcagaagtagcgaaacttatcgacgtttccacctgtatcggctgtaaagcctgtcaggtggcgtgttcggagtggaacgacatccgtgatgaagtggggcactgcgtcggggtttacgataaccccgccgatctgagcgccaagtcctggacggtgatgcgctttagcgaaaccgaacagaacggcaagctggagtggctgatccgtaaagacggctgtatgcactgtgaagatccgggctgcctgaaggcgtgcccgtctgctggtgcaatcattcagtacgctaacgggattgtcgatttccagtcggaaaattgcatcggctgtggttactgcattgccggttgtccgtttaatattccgcgcctcaacaaagaggataaccgggtatataaatgcaccctctgcgtcgatcgcgtcagcgtcggccaggaaccggcttgtgtgaaaacctgtccgaccggggctatccacttcggcaccaagaaggagatgctggagctggcggaacagcgcgtagcgaaactgaaagcgcgtggttacgaacatgctggcgtctacaacccggaaggggtcggtggtacgcacgttatgtacgtgctgcatcatgccgatcagccggagctgtatcatggtctgccgaaagatccgaagatcgatacctcggtaagcctgtggaaaggcgcgttgaaaccgctggcagcggctggctttattgccacttttgccgggttgattttccactacatcggtattggcccgaataaggaagtggacgatgacgaggagggaaatcatgagtaagtcgaaaatgattgtgcgcaccaaatttattgatcgcgcctgtcactggaccgtggtgatttgcttcttcctggtggcgctgtccgggatttcgttcttcttcccgacgctgcaatggctgacgcaaaccttcggtacgccgcagatggggcgcattttgcacccgttcttcggcattgcgattttcgtcgcgctgatgtttatgtttgtgcgttttgtgcatcacaacatcccggataagaaagatattccgtggctgttgaacattgtcgaagtattaaaaggcaatgagcacaaagtggcggatgtcggtaagtacaacgccgggcaaaagatgatgttctggtcaatcatgagcatgattttcgtgctgctggtgaccggagtgattatctggcgtccgtactttgcgcagtacttcccgatacaggttgtccgttatagcctgctgatccatgcggctgcgggtatcatcctgatccacgccatcctgatccatatgtatatggcattctgggtaaaaggatcgattaaagggatgatcgaagggaaggtgagccgtcgctgggcgaagaaacaccatccgcgctggtatcgtgaaatcgagaaggcagaagcgaaaaaagagagtgaagaagggatataatctcttttgagctttaagctgaaaatggcgctgtaaaaggcgccatttttttattgtagacaacgtgcactttgttcatgccggatgcggcgtgaacgccttatccggcctacaaaccgttcaaatccaggagattgcagcgaacgtgtaggcctgataggcgtagcgcatcgggcaatgttgcgtttgtcatcagtttcaaatggcgctttataaggtgccatttttttattgcgtaaccagacggcgcagtcgcgacacatccactgttttttctgcctctgccagactccaggcattttgcagattcagccacatttgcggcgaactgccgatcaccacagacagttttattgccatttctggcgtcaaagctgcttttccggtcagcaatcgacttgccgtagagggcgcaatttccattgctctggcaaactcgcgcaggctgacattaagttcgtccagtgattcctgaataatgtcccccgggcggggatgattggccattttcatcagtgatagtcctcgtaatccagtatgtatgcatcgccattgacgaattcaaatgtgattcgccagttacccgagacagatatcgcccaaattccatcgcgatcgccgcttaacggatgtagtcggtaaccgggcatatcgatatcagcaagacagcatgctgcatcaatcacagcgagtcggtggcgtaatcgtttgacttgcgtcggtataacgccggaggttttgccgagaagaaacaagtcacgcaatcccttgtgtctgaaattcattatcatctcttcatccttgttccctcgaaaggaacactatcactattgttccgtgcagcgcaacaaatttcgctacgttttcgcgaattgtgaggggaaagatgggggaggaaaagaagaagagtgaaattgcggaaagcgtctcgcaaaacaggctgcgacccgaacatggcagtcgcagcaaagacctcttagcgacggaaatcaatcaccatacggccacggattttgccttcttccatctcggtaaagatggtgttgatgtccgctaacggacgcagggcgactttcggcaccactttgccttcggcggcaaactggaaggcttcggttagatcctgacgcgtgccgaccagcgaaccgaccacttcaataccatccagcaccagccgtgggatgtccaggctcatagactccggcggcagaccgacagccacgacacgaccacctgcacggacagcatccaccgccgagttaaacgcagctttagctaccgctgtcaccaccgctgcgtgagcgccaccggctttctcctgcacaattctggcggcgtcttcggtgcgtgagttaatcgctaaatctgcacccatttcggttgccagttttaactgttcatcattgacatcaatggcgatcactttggcgttaaagacattcttcgcgtattgcagggcgaggttacccagaccgccaagaccgtagatagcaatccactgtcctggacgaatttttgacagcttaacggctttgtaggtagtgacccccgcacaggtaatgctgctggccgccgccgagtccagaccatctggcacttttaccgcgtaatcggcgaccacgatgcactcttccgccatcccgccatcaacgctgtatccggcattttttactgaacggcagagcgtttcgttaccactgttacagtattcgcaatgaccgcatccttcatagaaccacgccacgctggcacgatcgcctggttttaatgaagtaacaccagggccaacttctgccaccacaccaataccttcgtgtcccagaatcacgccggttttgtcaccaaaatcgccattcttaacatgaagatcggtatgacatacaccacaacactccattttcagcagggcttcgccatgtttcagtgagcgcagtgttttatccgtaacgtcaacatgatgatccttcgtaacaactgcagccttcatagttcctccttttcggatgatgttctgcatagcaggtgaggcaaatgagatttattcgccactacccagtatggatgagatctgaaaaagggagaggaaaattgcccggtagccttcactaccgggcgcaggcttagatggaggtacggcggtagtcgcggtattcggcgtgccagaaattatcatcaatggcctgttgcagagcttcggcagacgttttcaccgccacgccttgctgctgcgccattttgccaaccgcaaaggcaattgcgcgggagactttctgaatatctttcagttccggcagtaccagaccttcgccgttcaggaccagcggcgaatactgagcaagcatttcacttgccgacatcagcatctcatcggtgatacgtgacgcgccggaagcaataacacccagcccgatgcccgggaaaataaaggcgttgttgcactgggctatagggtagattttatctttccataccactggattaaacggactgccagtggcgaccagcgcgttaccttcagtccaggcgataatgtcctgcggtgtggcttccacgcgtgacgtcgggttagacagcggcatcacgatcggacgcggacagtgtttatgcatctcacggatgatctcttccgtaaacagcccggtctgtcctgagacgccaatcagaatatctggttttacattacgcaccacatccagcagtgacagcacatcgctgtcggtatcccagtcactgagattttcgcgcttctgcaccagtttggtctggaaaggcagcaggttcggcatcttgtcggtcagcaggccaaagcgatcgaccataaagactttctgccgcgccgcttcctcgcttaatccttcgcgctgggtctgggcgatgatcatttcggcaatgccgcatcccgctgaacctgcgccaaggaagacgatttttttctcgcttaactgaccacctgccgcgcggctggctgcgatcagtgtgccgactgttaccgccgcggtgccctgaatgtcatcgttaaaagaacaaatttcattgcgatagcggttaagtaacggcatcgcatttttttgtgcgaagtcttcaaactgcaacagtacgtccggccagcgttgtttcacagcctggataaattcatcaacaaattcatagtattcgtcgtcagtgatacgcggattacgccagcccatatacagcggatcgttaagcagctgttggttgttggtgccgacatccagcaccaccggaagggtataggccggactgatgccgccacaggcggtatagagcgacagtttaccgatcggaatgcccatcccgccgatgccctggtcaccaagccccagaatacgttcgccgtcagtcaccacaatcactttgatattatggtttggtacgttttgcagaatatcgtccatattgtggcggttctggtaagagataaacacaccgcgtgaacggcggtagatctcagaaaaacgctcacaggctgcgccgacggttggggtgtaaatgactggcatcatctcatcaagatgattgtttaccagacggtagaagagggtttcgttagtgtcctggatgttacgcaggtagatgtgtttgtcgatttcggttttgaatccctgatactggatccatgctcgttccgcttgttcttcgatggtttcgaccacttccggcagtaaccccagcaggttgaagttacggcgttcttccatgctgaaggcgctgcctttattcaacaacggaaattccagcaatacagggccagcgtaagggatataaagcgaacgctgtttttttgtttttggttccatgtcactcactcttttttgaatatccatccctgggggcttttatcgtctttgcattaccgccagggcgtcaagtaccaagtataaagcagataaaaacaaaaacaccattgcgcaggcaatggtgtttaatcgtcattgaggactgatggttatgaattacttttcagcggggcgttttctgccggtgggattatttaccacgctggatttgtcaccttcggtaactattttgcgctggttagaaattttatggtccagtccaagaatatgacgtgcctgacggttcgatttcattttaactcctcaatcctgttgctagttttaaggacaacatcgccgtagcgaagaaacacgtgctaaacccctaaattaggttgccgatcaagcatagcaccttaaagcgtagggtgctgaccactgaccacataattgatcgtttgctggtagatatcactgaggatgtcgttatcagaagcttccacccatttggtcagctccatgagaatgtcatcttcagtgacaacaccgtgctctgcccgaaggccttgctcaatggcattaaccagagcgggttctgctgttgaattttctgcctgataataagtaaacatagtgattctccgtgtctgtgtatttatggtgtctgctacggatcgcagatttataaagcacattcagcatggcaaatatttgccgcttcgttgttaagattagtcctggttgatgatttttatattttaactccatgatattgataggtattattattgtgacgagttgattgatattgatgcaatatctcttgagttatatatttccggttatctattgtggaaatttaatttaagtgcaggaattatattttcgccggattttattcggattatcctgcttatcctcgtgctgtttctcacgtagtctataatttcctttttaagcccacaggagagcaacaatgacaatccataagaaaggtcaggcacactgggaaggcgatatcaaacgcgggaagggaacagtatctactgagagcggcgtgctgaaccaacagccgtatggatttaacacgcgttttgaaggcgaaaaaggaaccaaccctgaagaactgattggcgcagcgcatgccgcatgtttctcaatggcgctttcattaatgctgggggaagcgggattcacgccaacatcgattgataccaccgccgatgtctcgctggataaagtggatgccggttttgcgattactaaaatcgcactgaagagcgaagttgcggtgccgggtattgatgcctccacctttgacgtcattatccagaaagcaaaagcaggatgcccggtttctcaggtactgaaagcggaaattacgctggattaccagttgaaatcgtaaagcgttgccggatgacgcctcaggcgcgtgaatgcctgaggcgtcagccaatcacatcaggctgagaagggattgttgtgacatggctatgcgttgtcgttgtccaactaaacgtagcggaaatcacagtatttaagtgacagtgtcacgttaaataaaaacccgcgagtgcgggcgagaggaatttatcagattttcagcggtaacacgctgctcatccagcctggaatttcttcggcgggcagggggcgggaaaagaaatatccctgaataacgcgacagtggatcttgtgtagcatctcaaattgctctttggtttcgatgccttccgccacgacggttaaattgaggctttgcccaatgctggtaatggcttcgagtaaggcaaggatgcgtttttcggtcagacaacgatcgacaaaacttttatcaattttgatttccgttaccggaagactgactaagcgggataatccggaaaagcctgtaccaaaatcatctaccgataaaccgatgcccatatcgcgcaggatctgaatgcgcttaaagatttcggtatcgtgttccatcatcatgctttccgtgatttccaccgtcagctggtggccgtcaataccccaggcgtgcattgcatcagatacctgattaggcagctgattactgcgaaagtgcagcgcagacaagttaacggataacgccgggatatgaatattctggctacgccattctgctaactgacggcaagcttccgcgatgacccagcgcccaatattttcgatttcaccaatctcttctgcgagaggaataaaccgtgaagggggcacatgaccatgcaggggatcgtaccagcgagcaagggcttcgatgccgtacagttcacccgtttctgcgaagatttgcggctgataaaccagtttaagttggttattgctaatcgcttcttttagcgctgcgcctaaaaccaaacgctcttttaccatttcgttcatcgccgggctgaagaactgccagccgttaccgccatttttgcgaataaaatccattgcattgtgagcagtggagagcaggtaatcgcggtttttaccctcgtcgtagctgatgccaatgctcaaggtgagcgggaatggtttatcgtcaatcattatcggcttgctgaccacattccgtagctcatcagcgatctgggtaatgttactgacatcgttttccaggctcacgaggacaaaagacgcaccttcaatacgacagagatactgatccggtttgagtttttcacgaaagcgattgaccacttccagcaatgcctgatcggcccacgcatagccaaggctatcaatcacatcctgaatatggtcaacaccgatgagatacaccaccggagagacggctttgtcgaccaggtcatcgaggtaattgtgcaggttattgcgatttggcaaaccggtcatcggatcaaattggatgagttgttcaatatgctgacggcttttttcctgttccagcgccagcgcggccatatgctggctgatatctgccacgcgttcgataaaggcgctggtttctgctcctgacgaggttttaatttgcaggatccccgcaggcgcgccatcgcgctgacgaatggtcgctgaccagctttgcgcattttgaacttctgcaccgtgcgaagatgacgcccagtgtatcggcatcccgttgcgcagcgcgaacagcgaaacatgcgattcgttgagaacacattcgatgttacgacaaatgatttcccccatttcatgaaatggggggctgctgcacatggcggcgagaatattgccttcaagctggcggatttgcctttcttcggtgatatccgagaatgtcattaccaggttctgcagatgcgcgagcacgtcataaaccgggctgatagaggctttaatccagattttttcaccggtgcgcgtcaacagcagaaattcgtcctgatcgcgggcggttttccatagcaactgttgtaaacgaatacggttatcagcagggaattctggaatgttcaggagtgtatcgggctgcataccgctggcttcgttaatgcagtaaccaaacatttcggtaaatgcgcgattgcactgcacaatatggcgttccggatcgaggacaatcaccggtcggtcgagatggtcaacggcaataatcaattgtcgggtctgttctttttgcgccatttctacgctggcatcccgtaccagcgccaggtaataaactttcccctcggcgctcactttcgatagcgcaaaacgggtccagattttactgccgtcttttttctccagctgcagctcccgactcatcccctcgacgcgcgctttaccaccttcacggttgtgacgaatgtattgaggatgcgcaggacgcaaatcccgcggaatcagcatatcaatgttattgccaatgacttcttcacgtttgtacccccagagcttctctgctgcggggttgaaaaacatcacttcatcattttcgttaattaacaccgcgcccatcatgttttgctcaagggcggggaaaaaaatgccatcggcggcattatccgcatcggttagcttcatgattacctctgcatcctggcgcatctaaagactggctttacagagttcaacacggtttctacctcgtcttttggcgatatacagagcttcatcagctatttgaatgaggcgctcatagtcaggatgaccattaaacatggcggcaccgatggaaagtgagagggcaatatcctcgccgtttgcggctttaaaataatgtcgacctttatggttaaaccgcaggccaaaatcaaccaaacacaacgtgcgagatcgactaactgcaccatattctcctgaaatatgaagatatactgaaaagaaataagcgacttaggacagtttcaatctacgctactgttcttcagaagagtatagcccatcgtaattatttttcggtgacagcgaatatcgtatgttttttcatattcatacatttttattagggggattatggctgtttaactaagtgtggttaattgcgtggttaatttgacgtatttaagcatgattgctagtgggatagttcaagagggtaacaagccagtgggtaaagcaccggcttgttacaaagtaagaatgggagtttaactgccccaacgactttgcagatagctgaccgcttgttgcgtctgcggtttattcagatagtcctcacggaacaagattgtgccgctaatttccggcaaagcatcgttaagatcgagctgctttttcagttccggtacgccgccgttaatcatccagtctggctctatctttgaaggttcacccactttatagaaggcgataccgatatacaggcgggtcctggtcggtttaacgacatccgcccaccattttgccaacacgtcataacgcgcggcactccgtgagaatggccagtaaatttggggagcaatgtaatccagcaacccttgttccacccatcgacgggtatcagcgtaggattcgtcataggctgccgcgcctcgggtatcggaaccgagcggatcgtgtgatcggttacgccacacgcctgccgggctaacgccaaattcgacttccggcttaatgcttttaatggtgtgcgataccttcgcaattaactgctgagtattgttgcgccgccagtctgcttttgacgcaaatgcgccgccgtatttgcggtacgtttcgttatcatttagccgtgaacctggtgactcagtatagaaatagtcatcaaactgcacgccatctactggatagcgggaaaccacttccgcgactattgatgtgatccagtcctgaacctcagggatgcccgggtcgaggacaaagcgatcgccggacgttctgatccagtcgcggtgttgcacatagacgctcgccggttgttgagacagagtgctattcagttccctgatagtaccgggcttcgtattaaccgatacgcgataggggttaaaccaggcgtgtactttcatcccacgcttgtgggcttcgtcgagcataaattgcagcggatcgtaacccggattttcaccaatcttaccggtcataagatcggaccacggcaaaattttcgatggccacagggcggtaccatccggcttgacctggaaaaagaccgtgtttatgccgagacgctgcagatgatccagtttgtcgatcatcgcctgttgttgtacacgtgcccggctggtggggttactaatgttaaccgaggaaaccggtggccagtcgaggcgagacaccgtggccagccagatgccacgcatcggttgtgacgattgttgcgtcgtggctggtggctttgaacccgctggtggtgtcaccatggactctggaggcgtgcttttacaactacacagtaaaagtgccagtgcaaccagtatcgctggtcttctaatcgctaatttctcgtttcgggagcagatatccatatgtgctggtttccggtaaacagatgtgcgctcattctcgtacttatcccggttaagtcaatacgacaacaagcacgaaaaagggagcgatgaattatcgctcccttgtcttataaccattcagacatggttagtgtttcttgtcattcatcacaatatagtgtggtgaacgtgcacgcgggtgcaggaagaagtgaccttttggtgcgttctgactgttgattggctccagagtgacgccggtattcgctttgcttttacgatcatgaacagcatagagaataaagggcagggcaagtaccaccaggaaactaacgaccagtaattcaacatacatatcggtagagtcaccctggatgttatccggcggcaggaaggaaacaataaacgccataattgaagtcagcagaccgacaatagccacgaccagcttcacccctttaccaccagggatattaaatgtgcgttttaagtcaggatgtttaagaaccaacacaatgtagccaataaacagcatgaaataagcacacagataaatcaccaccgtcagcgccagtgcgatcaggaaggacatgttgttaccgccaccggtattggtgaggatgatcaacgcgatagaagtaatcaccagctgcgaaatgaccagcgttaccggtacgccatttttgttcattttagcgaatgccgctggcagcaggtttttctgcgctgtgacatacatcccgcgagaaggaccaacaatccaggaggcgatttccgccagaacacccagcaacagcagtgcggagatcacgcgaaccgtccactcaatttccggtgccacatgtgacatcagaacggtaaaggtttgcattacccctgcggagaggttgatttcattacccggaatgaccatcgcaatagacaaaccgccaacagagcttaagcagattgccgccaccatcagcagtaacatagccagtggatagtcgcgcccggggttgctcatttcattgacgtgggttgcggaagcttcaacgcccatataactcaaaatgaaggcaacaaatacaaccagagtgcccactttagagaagtcagggaagaaggtcttcgaatccatttcgatagcaacgggggcaccggagtgcagataaatagccgctaatgcgatcaaaataaatgcaggtaacaggataccggcgaagaagccaactttagcaattcgcgccgtgtatttcgtgccaccaaactgcgttaatgccagcgcccaaagaatgatgagtgctgcaatagttttggtaatggggtcttcattcagcgctggccatttcaggatgtaggagagtgcccctaacacgaaatagagcatcggaataaaaccaatggcgatttgcagatagccaaatgagatcgctgcaaatccccatctcggccccagagtatttgatacccaggcgaagacgccaccttcttcccagccgtcgacggtagccatttccgcagcacaaagtcccacgggaataaaccataaaatcccgcctaatagcaggaagaagactaatgaaaagcccgatgttgcgaaggtagggtattcataaacagccattaccatcgatgccgttatggcaaaaaatccgagtaatgtgagctgcttagctttacctgtctgtactgatgtagccatattatccccctaaaacggtattcctgtcggaaccgcacctgttttgttctgaagcgtattcagaacaatattttccgttgctaatgccagtgaacagactttggaaattgtcccgaaacggcttcgtttcgggacaccgttaccgttaaacgttatcaggtgtgtttaaagctgttctgctgggcaataccctgcagtttcgggtggtcgctgagatatttcagggaggctttgtagtcttccagcaacagttcagcaaagtccatttcgaagccgcgacgacacataatgcgcatcaccacgatgtcagtggcttcaccgccgagagtgaaggccggaacctgccagccgcgcagacgcagacgttcagagaggtcatacagggtgtatcccggatcttcaccatctttcagtttgaagcaaaccgccgggatgccttcgtccgggcgacccgtacagatgaactcatacggccccagtttggcgatttcatccgccagataagcagcaacctggtaggaagcgttctgtacttttgtatagccttcacgaccgaggcgcaggaattcatagtactgtgcaatcacctgacccgccgggcgggagaagttgatggcgaaagtaccaatctgaccgccgaggtagtcaacgttgaacaccagttcctgcggcagcgcttcttcatcacgccagataacccagccgcagcccagcggagccagaccgaatttatggcctgaagcactgatcgatttcacacgcggcaggcggaagtcccagacgatatccggggcgacgaacggtgccaggaagccaccgctggcggcgtcgatgtgcatgtcgatgtcgataccggtgtcggcctggaatttatccagcgcatcgtgcagcggctgcgggaactcatagttaccggtgtaggtcacgccgaaagtcggcaccacgccgatggtgttttcgtcgcaggcttcaatcatgcgtttcgggtccataaacaactgaccggggcgcatagggatctcacgcaactccacatcccagtagcgggcgaatttatgccagcagatttgtaccggaccgcacaccaggttcggtttgttagtcggcttacctgcagcttccatacgcttgcgccaacgccatttcatcgccatcccgccgagcatacaggcctcggaagaaccaatggtgttggtgccaacggcctgaccatttttcggtgcaggcgcatgccacagatcggcaaccatgtttacgcaacgcagatcgattgctgcagattgcggatattcttctttgtcgatccagtttttgttaatggataaatccatcaacttatggacattatcgtcgtcccaggtctggcagaaagtggccaggttctgacgagcgttgccatcaagatataattcatcattgataatctggaatgcgacatcatcacgcatttcgtgcagcggaaaacgttttgattctgcgatagtggaaatagacttcgcaccaaaacgtgaatcgagtagttccgaccttaaatccgttacttgcttcttatccattttaaactccttaaaatgattggatcgcattaaaaaagtaggatttatcgataaagtaagcaagtgcaaaggactcggttttaaataacaaaatcctaatgttatttatcgcgagatattgcgtgaataatgtatttttattaaaaaacaacataatagagaattctgtgtggaggtaaggtgttttatgttgttattttatgtgttttctatcgtctcctgaattatcacgtaaaaatcagaccttataatatcattattagtacacggttatttactttgaacacatttataaaattattacataaaaatagcgaatattgataaaatccccgccaacgatgtgttgacggggctgtgattattttggcaataatactccggtataggtattcaccggatgagaaagatattgtttaacagcagtgttaacattctctaccgtcatttgtttcaacaattgctcctgctcagtccatgctgcaggatcgtcatattgaataagactatttacaatggtattcgctaattgttgaacgctacgctgttggatatcgaggctgcgctgaacgttttgctggtattcgttcagttcttgctcactaatccctttggccagacgcttaaccatcacttcattcgctaacgttaacagttcatcatgtcgttctggttgacaagtaaaagccagcaaatgactgatatctttggcctgaggatcaaccgagaggcgagaagaaacgctgtatgccccagatgcctgttcacgaatattaatgcgtagatcttttgccagtgcgacgttaaaagcatcgagcgccatacgcgtcgccagattaacaggagtccgggaattataacgcttccactgtgaaacctgtgccactggttcattttgttcttttacagtaaccgatgcgttgtccgtcgcgcgagttaatggtttacctgcggctaatggcgaattagagtgtttgatagatcctaagtaacgcgtaattaacgccacgagtttgtcttctgcgacattaccgacaatgacaaacgtgatatccgctggagatgaaaacaactggcgatcggcagccagtgcatctgcggcagtaaactgtgcaatctgattttcttgcggtaatttcgtgcggtcatcggcatagagcgtctcatacatctgctgggcgaatttctccgctggacgctggtcgagcgttttcaacgcctgaatttgagcattttgtagcgatgcccaaatattgtcgttaatcgtgctgtgggtgattcgctggttaatcaactggaaaccaggttcagggttattagtccgcgcgctaacggagagcaacgtattcatgccactgactttactgctcatggttaccgagttttccgcactccagcgtttcaggctggaagaggagagttcaccaacgccgcttccgcttactgctttattagccagcgcgataagtgatttttgctgcgcagggaaacttaaatcgcctttattagatacggcaataatttgtagcttttgctcttcacccgcggattttgccagaataaccctggcaccattggaaagtgttaatgatgtcagattctcagccagcgtttctttgctgctaatttccgcctgtgggtcagcgtctactgttaacgataaatttctgcctgggaagatgtaagccgccagctttttgttggcgtactctttttccagcgccaggatagccgcaggagacaatgcttttttggcggcaacttcattgtttaccatttgctcccaaaatgcgtcctggttctttcttaactgctgccatttttccgccagactttgcacggtaatttgctgccacagacgtttcgaaagttgatatgtctcttccggcgacaagaacggcgtattatttaatgagctggatgccaggcgactggtcagcatacgtaaatcacgctcagcttgctgatcaaccgcatttttcagccaggtaaggcgggtagatttaacatcatcgagttcttcagcagaaaaaccatgctgatcaatggttgccaactctgccattaatgcattcgcagcatcctgcatattatcgtctcgtgcatttacacggaaaaatagcgactgataatcgggtgcaattttgacgctgcgcgcagtgccgccagaaatagtcttcaactcgcccgactgtatgcgttcctgcagacgttggttgaacagctgaaccaacatgctccattcagcttgttcgataaagctttgctcatcgttcacttgtaccattggcaggcgataatagagtgcgatgccgttcacccggttttctttatcattgatgatattaaagcgcaggtggttttcggcttttgtcggccagacgcgattttcagctgctttgttagccggaagcttacttaaattatcctttatcagcgccagcgcttctttactgtcgatatcgccgaccacaataaaggtcatattatttggttgataccagcgttgataaaattggcgcaattgtgccggtgtgaccgtggcgacggtatccatcaggccgataggttcacggtctaaattacgggtatttgccagcaggaaagggcggcgcgcctgagaggtgcgccatttcgcatcctgatgggcacgccattcctcagtaattacgccgcgttcagcgtctacttcgagtttttcaaaggttgcggcattactccattcactgaagattgccatcacttgttgcagattttgtttctgcgtagtcggcaaactcacctgatacactgtttcgtcatagctggtataggcattaacatcgcgaccaaaacgcaggcccattgactcaaatgtttcgatgactttattacccggccatgtttttgtgccgttaaacatcatatgttctacaaaatgagccacgccgcgctcattgtcttcttcctgcaatgaaccggtatgaatttgcagccataaatttacctgatcctttggttgagcatgcggataaatcatatatcgcaagccattgtccagttgcccggtaattaacttttcatcctgcggtaaggcggcggcaatcagtcgcccggggagcaacagagttgccactaacgtcagtaagaaacagaggtttctcataattatctccatgcgaaaaccgggcgaatttacccggtaaagtaaaatccgaactattaaaatttcatgctgacatcaagccagaaagtacggccactggcgtaggtcgccacgccggtattcgttgtatcaacagcggttttgctatccagtacattgagaatatcggcactgatcgtcaggttttgttgtttcagaaattgtggcgtccaggacaagcgggtgtcccaggtcaggctgctatccagtttctcgtcaacatactgcttgtaatctgaatattcgctgatgtattgcgcattcgtcttacccaggataatgcgagctttacgcgcttcttgccaggtcagcgtattcgcccacaccaacccgctcggttgatgcgtgaaatccatgtttaaggagatctttagtggattattaaaatccgccactggaacgctatcgtaagagaccagattaccgttataaaccacccggttatcaccggtattgctctcctcataaccattgtttaacgacaagttgcccttgctcttgatatagctaaagacaatttgcgggttaatatctacctggctgatatgcaggggttcggccagttcaaaactgaggttaaacgaatgtgttttggttttgccatcgttgttatattcagtaatggtggttttagtcgcgctgtcggtacggctgcttttgctgatttgatcatgcgcttcacggtaaacatagtttgcacgcgcaataacgttcttaccgattttctgctgcaatcccattgccagttcatcgttataaggcgttttcaaatcctgataacgcgtcagggttttattgcctgataccgattccgtccagctattgcggatatcacgtaatcccatatcaagaatattcccgccatagtaacggttataaccggcggtaatcattgaggtttgatcagcaaaaatatcccattccgtcataaatcgcggggagatattgtggtttgacagatagttgtcatagtcataccgcacaccgggcattaacgacacattccgccagctaatgcgatccgccatatacagcgtgtagttgtcaattcccaggctgcctttacctttatggtaaatggtatggttagttttctttccggcagcattaatcacataggattcagactggttatggcgttcagtccatgcatcggaatagatgtattccgcgccgaagtagggttgatgcgaaacattacccacggtgaatttttgccagtccaggcgtgttttgaaggtgtaattatctacagcctgggaaatgtgtcctaatccgccacgggtgcaacgccctgaaatatcaccatatgtacatgaaagttcggtgtaccagatgtcatgatcgtgacgggtataatcactaatatgatcccaaccaacggtggtacgcagtttggcccatgcgagctgggtatccatatcccatgccagaccataggatttattacccatttcgcgatcagactccggaaaggtgctggtattataatcacggctggagccggtatattttaaggttaaatcgtgggtaaagcggtcgctggcaaaccaggtaaatttgctcaatgcagtatcgataacgtttttatactgtgccctgccggcgacaatgccgtcattcgaaacataatccgcgcgggtgatatcagactggcggcgcgataaaccggcggtaacgccaaagttatcagcgagttcctgattaaacgacaaggtataaaagttctttttaaaatctggagagtaataagtacttcctgaagaaccttgattaaatgcgctcttgttattctcatcgatatgcgatgttaaccagtccgaacgcgtagtgcgataacccagtttcacgctgctatcatcagcgttgaagcgtttgatctttgcatcaattaccccgccattgaagcgaccgaattcaaccggcacaaaactgtcataaagcgtcacattgtccagtaagctgacatcaagataatacccctgtgacatcccgctaatattggttgcactactggcatcggactcattcgctgggttcaggttattcgttgcactaataccgtcaatcaaataggcattctggtagggcgacgcaccgtgaatagagattttctccgggcgaatatctccctggttcaatgaggtactttgcgttgaatccatgcgtaccgcagggttggttctcagcagatcgctgatattgccattcccggtcggtaaacgctcgatgctttcactggtgtaatgcgtgttgccgtttacgggtacagggacaggagcatagaccgtcatctcttcaaaaacatgcatgtacatatttttgtcatcgacggcctgcgccacatcagcgccacataaaatgacgccaggaataagaactcgcttcatttatttatatctccgtacagcagggcttttattgtttttatataaccgcgctaatgtcacaaatatcatcgaccaggttccagacaccgggttgatgtgtaaccataatgacgccgcttgtggggagtttttctcgcactaaacgcagtaagcggattgcctcttgttcctcaagatgagaggtagtttcgtcaagaaatatccatttcggacgtcgtaaaattaatcgagccagggcgatacgttgtttttcgccgctggaaagaatatctccccagcgatcgtgatcatgaatacgcgcagccaatttccccagaccaacctgatgcagtacttcgctcaacgatttatcgtctacggacaggggaagtgctttacaaataatctctttcagtaagccggttttgattaacggtgtttgtgacacataccaactgtcagcaggagaagaaatatcacctttaaaccacggccagcagtgggataatgttttaagcagtgtggtttttcccgcaccagagtaacctttcagcaatagccatttgcctggcgaaacatgaaagttcaggttctctaatatgatcttattatcaggagtacgaatactcgcgtcagccacttgtaccgcatgttgacaatttttaggcttattcgtagggcgctgttcggtgagttgatggaactcatacaagcgatcgataaccgcagccagttcagcaagttcatcatatttataaataaaccagcttaaattgttcgataccagcataaatgcctggcgcgatttcatcagtccgcccagattgatctgtccgctaataaactgcggcaataacagaaagtagggaagaacgctaagcgagcgcgaataaatattctgccagtaatcaagccaccgctgacgattcattaaacgatgccagttctctttaatggtatgaaaattttcgctcaactcctggcgttgtagagactcagcattgcttagcgcaatcagttctgcctgcttattatgctgcacaagattagttcgaaatgtcgcttcgctacgttgtttttccacattaagtggacgaatacgtttaccaaccttatgggtaaataaagttccaccgatcacaatgagcacgacggtatagaccatatacccctggatactccattcagttccaccaacagtgaatgagagcgtacccgcgctttgccaaagaataacggtaaaggtgatcagcatgctaagtgactggatgaagccaaatgaaaggctgagcgttttgctgatcagtaagagaatgtcttcagcgatacgttggtcagggttatctgtatttttatgctcgccgtagatctgcgtgaagtagtagtttttatctgcaaaccagcgattaaggtagtaatctgttaaccattcgcgccagcgaatagtcagtagtttaattaaccatgttttgtttacggatattaatacaaagatccccagcagggcagggaaccaaaggacaagctgccaaagcttatcagtttctttctggcttagcgcattgaaaaaatcattattccagtcgtttaaccagacctgaattttaaccacgccaaggatcatggcgaggataataatgattaacaacactgaagttttattattcttacgcagccaaaagggcttcagcagacagagatactttgctatcaacatacaaaacgtaatgggaatggttatcattagcgaaaattgattgtgccacccaatgattatctatggcaatgatatactgatgaaatttatttaagtatcatttaacaatatgaaatataaagaaatatttaattttcagtggttatggttatactattgataatcaagggtattgctaatgccctgacgcatacctcgtcagccaggattttcgcaaaggaagatgatgaagacgaaacacccgacaggaatttatgtcgggtgccttgttaaggtcataagaaggaggctaagaatggagctaagggggagcgttattaattattctccatttgttttgcaacatccataatgtggtaaagcggtactctgttcttagctaactccaccatggcgttcatataaggtaccatggttgaaaaaaggattttataaccttcgcaaaaataggaaacagtctcattgtttgctttagtaatacgatgcttagggcaaccaccattgcagataggtttatatacacattgctgacatttcgctgaaatccgttttttttgcgctgtcagttgtacactgttcatcgttttgagttccgatttattaatgtttccaattttgtactgtggatagacaaaatggtcgcattcgtaaatgtctccattgctttcaacaaccagattatccttgcaggactcctggaaaatacaactggtatgcccattccccaaaaaacggctgacaaagctttcaaactgacggatgaaaatttcacccacatcgtttttaacccattgcataaaaatggttgacataaacttgccataagccgtgggaggcacagaaaaatcaatgatacggaatgtgttctcactatgaccactgaaatcaatattcggcgtcccggtttcgagcaattcgataaattgcatatgtttactgccgatagattttaaaaaatgataaacctcaagagggtaatggacattaatgttattaatgacggttaacgtattaaactctatttgatatgatttcagacgctcgatggctgctatcacttttgcaaaagtaccgttacctgaattactgcgcctgtagcggtcatgtagttcttggggtccatcgatcgagataccaaccagaaactcatgttctttgagaaaggcacaccattcattattcaataaaatgccattcgtttgtaatgcattaaaaattcgtttttggcctgcatagcgttgttgatagtgaataactttacggaaaaaatccaggccagccagagtgggttcaccgccttgccaggtaaaatagacctgattgccagacgctgcgatatattgtttgatgaactctttcagagtgctgtcatccatccatttttcatgagtaaactgcgactctttttcaaggtaaaaacagtaatcacatttgagattacattgaaaactggagggcttggctgtaacgtgcatcgctatctcgctcaataaggcggcggaaaaatccgccgcatgaaggtttagttatttcgcttcgcttaatgctttcttgatattgttaaacttctcctgatttacctcgctaagcggtggctggctgttatcgataaactctcttaccacgccttgcatctctttaacgacctgcggattggcggcggcaaggttatctttttgctgtagatccgtcagtttgtatagacctaactgattattttctactgtatagacgagcgaataatcgttatttctcaccgtataagagaattggcttaagtcctcggtgttggggttatgcgggtaatcgtctgactgatggcggacaaatttgtggtaattatcccagaatggaatgttttcctcatcaaaccagtgagaataagatgttatccaggtcagatttttatgtggctcgccctgtttcttattttgcaaccagggcagcaaggaaacgccatccagcttaaggtcttttggaatgctgatatcggctgcatcaagagctgtcgggtagaaatccattgcggaaatcagcttgtcataattaccgggttgaagttttcctttccaccacataaacattggggtgtgagtaccgccaggataggtctgactcttatagcctttttgcgccccgttcagcggcagaggaccatcgataactgcaccattatcggaggtaaagagaataattgtattgtcatactgtccgtttttcttcagttgttcgagaatgcgttttacaccctgatcaacagaataaacggaagcgtagtaattatctgctgtttgactaccggtattaaattgcttctgatattgctctggagcaggattatcatttggcagatgcggagcattataagccaggtaaagcataaaaggctggtcaagtgttttggcacgatcaacaacgccaattgcctcatcggttaactgatcgctgatataaccttttgcggggacgcgttcacggtttttgaacagtgaaggggagttgtaatatgccgttcctgcagcatggaatcccataaagtaatcaaagccacggttttgcggttgccattcttccgcagaaaaggtagtgaagttgtcatgatagtcacgcgtttgtttatcttccggcactggcacattactgatttttgacaagtgccatttacctactgctgcagtgtaataaccatgattctggaataattcaggcaagaaagtttctgttagcggaataccatcctgagcatcagtattggaatagacaccaaagcgggcgggcgctcgaccggtcattattgcggcgcgggacgggccggaaacaccgtgcgccacatagccgttagtaaaacgtacgccttcatccattaatgaaaggagcgtcggcgttgatttttgcgcagcttcaatggctttatctatccctattttgtaggtatcgacaacttcacgattttccattgtttttgggtcaaaagatcccttatcaaaaggaagttgtccataaccaagatcatccatggtcagtacgataatatttggctttcctttggtactgtattcagtcggcgtaaagtctgagaaagcaacgtttgttttggttgctttcagctttacatcatctgccgcatgagcagcaaatgcagccataccagatgccagtatcaaagatatcgaggtacttacgacacttttctttaatgcagacttcataaatgttcctcttcttattgtacttaattccaaagtaattttacgaagagaaataagttaatgtaagtgaagttagtcacataaatagatagcaaatttagctaaaaaaagggaaataacagtccataacgcattgacattactttctgttctactaagtaatttctcgccgataaacaactaatctattgatatttaataaattattgtattttactgacaaaatgccgaattgagatcataaataatcatgcaacaggttatgcaaatgcataaatatgtgatgaatgtcacttatttatttcaataaatatatcgcctaaaaacaacgcggggcagggaatggctgccccatttaattcttacgcagcgtgtgtggttgactactcgttagcaaataatcaaatagctaaagcattcatcgtgttgtccgtgttcatacccgtgcgcctttgacaacggtactccttagaaactctctttggactgttgccgaaatgtttgcggaacgcataaataaaataagatgtactcgcataaccacattgttcggcaattttattgactgaaccttctacgcgtatcaaattttttgcgtgctgcattctggcatctaaaagaatctgtgagaatgtcgtttgctcttgctttagttttttcttcaacaggctttcactaatgtacaggcagtcacaaatatctttcagcttccatgggtgcgccagcttcatgttgacaatatttctcactttcccggaaacggatagcacaccgttagttaatagtgtaatgaaacctttgcatgcggcaaaaatagacaggcaagaaaaaagcaaaagttctgaaaaattatgatgattgcgttcttccgagttgagataagcaatcatttcattaagcaatccagtcggtacatttgaagcacgtaaaaacttcgcaggaacaggcaccgtcactgtctggatgttagtgcattgtagatattttttaatggtattttcattaaatccgatttctttaaaatgccgctcataaggttcaaaatgcgtacgaacagcgttatctaccatcaggatctcgccgtcagagaaggcgtaatctttatataaaatgttagcgttgaaggcatgatgaataaatataacagaacaaacgagcgacattttatctccttaaaacaataaagtttttatcgatacttttttaacatttcatatttataatttgctgtttatttttcagtcttgcaaactattgataatgaaatgtgtaagatcccttgcaatgcgacccatttctgaaatacccagctgatcaattgccgaaaaaatggctatcaacgtaagtgtcagtaacaagacaaccacaattacagacatgatttctttatagttgtctctttgcgtgattttgtttttcactgtggtcgcatgcatttcaaatatgtttatttagcggataacgttaaaaatcgttaatcagtatgattaatataacaggctggataaaagaggaaataggactggcgcttcagtactgagcggagtttcttacagctgtaggcagaagtttatatcttatagtgtgtgatttaatttaatccatgtgagcaaattgcgcgataatagtcaatgaggaattcttctgctgtgcggatgacagcagaagaaatgaggaggagaattaatttgatggttctaattcaaccggaatacttttatagccaggaattccacttaatggatcgtggttatcaagtgttagcatgtgattcgattctggaaaataggtcaccagtgagcggtcagccatagggtaaatgaccacttttaatctatccatgcggcgtgagctacgtttaccgtctggcgtgagtgcaataagattaactctttcgccgttttttacacggcaaattttagcttgtttagcactcataaagaccacatctcgttgaccgaatacccctcgatagcgatcatccataccataaatcgtcgtgttgtactgatcgtgactgcgtactgtcgccatgaccagcttactgttaaacgctgaagagggatcttctaacagccctttactggtaatgaaattagccttacctgacgacgtcatccagcgcctttcagctgctgcgtttatcaggtgaaaaccaccaggatgacggatgcgctggttatagtcggcaaactctggcagcacagcttcaatgtcattgcgaatgcgatcataatcttccaccagatactcccaggctaccacgctctggggtagtgctgcttgcgcgattcccgcgaccactgcacactctgatttcagcattacaccggcgggttttaacacaccacgcgaggcatgaatcatcgacattgaatcttcaacggttaccgcctgcgcaccgcttttttgcatgtcaatctcgctacgtcccagaaccggcagaatatagctatgccgtgcggtcagcagatgagagcggttaagcttagtggctacgtgtaccgccagatctaattgcgttaacggtacagcgctcgcttcccgatctggcattgccagtgcaaagttgccccccatgcagatcaatgctcgagcttgccccgtacatatagcttgcatgctggcgattgcagcatgtccaggtgcatgaggtggggtgaagccatagcgctcacacaggcgatccagaaactctgcagacggtttctcggtgataccgacggttcggtcgccctgtacattagagtgacctcgtagtgggcagatacccgcaccaggcttgccaatgttacctttcatcaacagcagattgaccagttgctgtacgttctgggtaccatgttcgtgctgagtgatccccattccgtaacagataatagttcgttcggcagcggcatatgcatcagcaagttcggcgatttgtgtctgacttagtccagaaatacgttcgatatctttccactcggaattgagcacgtcacggcgtagctcgtcaaagccgacggtatgcgtttgaataaattcgtcatccagcaatgagggccgacctgcggcgcttgcagcatcatcgcgctcaattaacaggcgcatcatccccttgagcaatgccatatcgccaccaatgcgcacgttatagtaggcactggccaactgagtctcagagttcgtcagcatttcaaacgggttttgcggtgcggtaaatcgctccaggccacgttcctgtagagggttgatagcgatcattttcgctccccgtttcactaaagcgcgcaacgaagtcagcatgcgagggtggtttgtaccagggttatgcccaatgcaaatgactaaatcgcatttctcaaagtcttccagcaacacggtccctttacccacaccgatactcgctgccaatcccacactggtcggttcatggcacatgttggagcagtcgggaaagttattgctcccgtattcacgggcaaaaagctgataaagaaaggcagcttcattggaagtgcgccccgaagtatagaattcaacctgattgggatcactatagctttgaaggcgagcgccaatttcgtcgaaagcttgttgccagcttaatggcttgtaacagtcgctgacgtcatcatatttcaaaggctgagtgagacgtcccgcagcctcaagctcgtgatctccccaggtaagtaatgattgaaccgtattctcagcaaagaaagaggcatttacctgcttatccgtgacttcccaggcgattgcttttgcgccgttttcacaaatgtcgaatgacgcactgtgcttaggatctggccatgcacatcccggacagtcaaagccctctggcttattcatgtcaaacatggcaataacatcctggcgtatatccatctgcttacgtactgcattcgctacggatttaacagcaccccaaccaccggcagctccctggtaggattcaatttttttcttcatctgcttatcctgtgtggaaatgaattattaggatttgtaatagcgatgatgcacagtatatacatagggtttatcgtcaacatggatatataagagtaggggactactctcttactatttttactctattatcgttaaataatagagtagtataaatacgataagttaagcatcatctctcatagggtttaaattaacataattctcaatataaaaaataagactctggcttcaattgtgcgcggattttcttacaagtgtaggataatagccttcacaaaataattatccgcgcaattttcgtgaatggagcgcatagactaatgtcaaaatcacaattattcatagataaaagtgacaccaatgactgactggacggctccggctgcaaccttgtttcctgtttgtccataggttgcgcttaaacccagaggtactttgcttttatttactgtccccagggagacattttctcctgttgccagtgtttttccattacgcatcagagagacacccacgcccgatgcttttgttgcatctggtgctgtgttagcaaacacttgtcgggcactgtcagtggtggcacccgaaagataaaatgagagcttttgttcgctagagcaatatacaccaaggggtatttctgcgcttccaggaaagtccgggagattcacggtgacattacgactatcaacggtgcaaccgcctgttggcataacaacactgttatttgaaataatattccacgtaaaattacgcggatttccgcttcctaacgtggcaattttatacatatgaatacgggcaataacttcccctgcttttatgacaactccaccagccgctccgactggggtaatatagagttttaacggtaatggcatcggtgtcttatcaccaatatccaatacgttggtatttgtcgtcaacgggaaagggtaggtcacattattccagtacagtgatcctttatatgactgtagggagcctgcgaaagctgatccttgtaccaggtttatatgatcagtgtcgtaccagccgccgtaatcattccagcaacttatatgctgagacaagtctacaaccagattctggcccggttgtattacaggatcgagattaacataaacagaggttgtacctgctccaatacttgacccgccatcgacattacaactgaaggcaaaaactttgcctgcaattaatagaagataaataccgaacaggacctttatactgaatgttttacccatgatatatcctaaggttaaaaaattgatttaaaaaggaggaaaataaaatcaaattgatgttattgccaggtatagatcacattgattagcgcctcgatcgtaccctggcttgcgtttccattcaccgtgatagctcttgccttaagtggaaactgtgcattacgagtgatctcatcaacaataaccgttttgctatcgccattttttaacgtcgcatcctggtcatcccttagctctatctgaatattttcggcagtaccttcatttttgtaataacccgtattgtcagttgaacctgtcacgattgccgtcactgcacttgtttcaatcggacaatcggttaatgacaaagtaatattgtgccagccagatgcagaaccaggttgttgcagattgcgtgtataaagatccccgagattaacgttagcttctttggtttgaatagtgcatggtttagcgactacccgaccattaacagtgatagtgacatcggcggcctggagagttgctgtgaataatgtgcaaaacgtagctaacaggaacctcttgtgaagtcttttcatatctgactctgattattgaaattcaagggtaaatgttgccgaagcgctcaccagtcctggattgacggacttctgagttgacttcaaacgagcggagtaaggcaaaatattgttctgatctggtaccaatgggatccactgcatcccggcatgaaggtcattcaatttcaccggacgcatatttccgtccagtatttctatacccaaaccggaggccgtattgcttccttcatctagtttcaacagagtattattttctgcatcctcaataccgttaaatgcaacccgaacccccgttgtccctttactgcattcacttaacgtaatctgaaaagggacggctggacttgtgctaccggtcgttggaaattgtctggcactgtttttttggagatctacggtaaaattaagcgaatccgatgagactgtgcagccataatcgaggacgcgcccgctaattttaataacactatctgcggataaagcagaataggtggttaatcccagacataaaccgaggaaaataatgttattgtatttcataatctattgttccttagcgacagattgctgtctgctggttcagtaaggtaccaggagaaacttcaggaagcttgtactcgacaatacagtttgagtttttatctttgccccatgaaacctgtaatttccctgactgtggaagtccagtcagataaacctgaccgttttccgcgacaatgctgccatttttattctctccatgtgtgacaattgcaccgaatggaacgctcttattaccgtacttcaacgtcattaatactttcccgccgatttgtacattaaatgttgctctggcaatagcaccgtgagttgggatgacagtgaccacggtttcatccagttcaacattatctgcaagggaattcgcgttaagagcgacacgattttctctatattctgtcgcaaatggtaatatggcatagccacgccagtcggtatgaataccggtctggttctctattttgacattatcagcgccaggagccttaaccagaaccattgtgtcgcccagcggctgtccaaaggtgatgccatcagcatgagcaataatgccaccactcattccgtaataaatctggctgctgtcaccactccgactgtaaccgacattcgtattaccgtaagctccacgataattaagagaactgtaaccactggtgccagacgatgtattacccccgtgggtgttaccgacctgaacactataattcaggttattatccggcagtagagtgccataaacccctgataggttggtcatgccgcctttcaaatcgtttgacatactgtaactggcgtttgaattatgaaatgccgactgactatctgtacgcatccaatgactaaagggaacattaagcgtaaaagcgagtaaatgatcccgatcgttttgccatatattattggaatagctgtaattcagcgaagtcgtaatatcaccaaacggcacatttaatccaaatgatatttgctggtcgctgcgtgacgtgttccagtaactttggcgactggcactgaaaaatgtcgtaccgtaatttccaagctgctgagagatgcttatttgttcctgaccacgcttactgtagaacagattaaaataatcaataaatagtgtctgctcactggtgtctccggtaggaggcttgacggtgtaaccactcattcgactgtatgcactgtcggataagttataaaaaccttgcgtagaatagcgatatcctgcgacctggatattggttcccgtctggtagaaggatttgctgtagacggatttaaccgattgtccgctgtgacgggtgtcatctgcaagtgtcgtattggcctgcgtaatatcgaaagaaaaggcaccaaaaagtcctaaatctttaccaataccaaggttgaaggcctgataatcttctgcaatttgcattccgccataaggtgtccagtttcctttcagaccatgcatcaagcttgcttgtacgaacttgggggtgctttgcaggttatttccactacgatattcccccatggcaagtgcataacgcgtatatccagcacgttggagaaccggaacagacgaataaggaacatataatgtctgaatactgccgtctgcctcttttatggttacttgcagatcaccaccattggccgcagagttgatatcatcaatagtaaaagggccgggtgggacagtagtctgataaacatcgtatccattctgttttacactcacttgtgcggtgccacgagcaataccatgaatcaccggagcgaaaccatgttggctatcgggcaacatcgcttctgttgaatttattttaaggccacgaaagttcacactgtcaaaaatatcgccatcggtataactatcacccactgttaaccgtgagcgtaacggaataatgtcacgttcagccgacgtattgatatgctgccatttattgctgtcagatgaattgctactcccactgttataactccacgttgagttatcgcgcagtcgccaactaccaatgttgatgccactctgtaaattcaaatatgcatagttggattttcctgcattatggttactacggttattaatagaattaccattaaaactatagtttagtagcccggcatttattccttcttcccacagatcaggagaaacatagccgcgagccattctgccgacatatatttgcggaacggagagtgacagatgttgctgaccaacatcaaactcagatgatgcgtcagccaaacgatcctgaagtggtgtgcatgcgctgttgtccggcacatgtttatctgccgaatgttccttgttgtctaataatgctgatttttttatgccaagactgacaagaaggtctgtactcaggcatgggatgagatctgcgttattatcatctgcaataaaagtaatatcccgactagccataaattcgtcgttcaaataaatgtcgacccgatatgtaccaggtggggcctcgcgtcccttagtaaaggcagataaatcgacagattcagcaaggtcattgcttaaaaaccgtggattaaaataatactctgcgtcaacgggaaaaaccgcagttgctaagccaagggcaaaggtaagccgtgcaaagcgaggcagtattaacacctgatgcatacgatatgccttaaatgcggcacgaaaggctgtcatttttaatcccgattgagtttattattaattaggtcactggcttactgcatggttgccttaatacgcggagttaatgcaccgtaatcattgattgtctgaaaactgatatccccggttacagcatgcgggatatccaccgatacttcaccttttggcggcaccatggtgtttgggagattgctatttcctgctttcatatttgttacggtaatgaagtagggcgttggattaataagagtgagtttgctaccgctgcgacgaaaccgaagcattgcaggcgcttcttcaggtgccattgccagatgcgtggggcgataaaacatttttatgcggctaataattgccagctgtaatgtattctcattcttctggtctttttccatagcagggatagctttaacattaacccagaacaggctttcacggtcgcctggtaactgatgattagtggcgttgattatccgaagcgtattctcttttttaccttgcatggaaaaaagcggtggggtaatgacaaactgggtatctttctggtcacccgcattttctatccatgactgaatgagatagacactggcaggatcattattcgtgacaggcaataaaacctgtttctggtttgccggataaattacccgcgtcgcaccaagtgcgacagctgcgttggcaatggtgctatggcaagcaaagagcaataaaagtaacactgtcgccataaaggaaacagagtagggggtacgcgtagtttgcatctgatgcattctccatgtgttaagaggataagcggggaaaccgttacatcagacaatcggtaaatattgctaatgcattggcgagtcgccggttttccagacttaatgcgtttgtaataaatgttggttctcttttgataggaaaaccttgctaccaagtaaatattttaaataacagcaagtttaactactgttgtttattgatcgtttagatattatgtgatttttcataccgctccaaaatacaaaccatttttcattaataatgagatgaacattggtgaatttctcgggtgtgcgtagccatgccacacacaccctgtttcaatttcagatgacgcatagtcaccttaagagtgaattatagatattgaactttgaaggtcgcatcagcgtttgcagtaccagctactgactgcccgagagcaatataacgagcctggaacggcagtatattcgtgccatcaatcaagtcagttttagcgctaaaagtagcaccatcaagtactaatacctcccctgtactgtccaaaatttggataccgacattttgggcagagcctgccgctgaactctgcagcgctaatgtatcgtcattactggtgacagtagtacccaggaatgcaacagctgcattactggaaacattggtatcacaatcattcagcttgatattgaagccaacggcggagctgaggtcacccgctttagccaggcgagaagaacgaacctgacccagctcaacagtttggttcattgattctgaatcaatcgcacaagcggcatttaccacttcacctttaaaatgaattacaccgccattaacagtggtcgttactgattcatcaccctcggctgcgcttaccgcagcagacgacatcgccaacacagaaacgacaataataccgacatgtttgagtttcataattctccaaaatttatatttaagtagctgaataaagagagttaacaattaagttattctgttattgcttataaaacaagaatcattcttgattggatgttgccctgagaatatagtttccatggttattacatttcacgaagaatgataatatctttaaattacaaggacacctattcacaacaagtttattgctgcacttgttgtagagagtatttgtaaaaacattttatgtcgctaaataacatgacgatttcattatgcatgttatttataaacagcgactaaacagaatattattgcgaacaagggaagtgtcaggaaaggtcaagaggtactaatagtttatatggctataaacattagctatgattaatatttgcctggtgaaactaacaccaaattgctgtaactctctttgaatcataaactgaaggatgatgcagcacagttcctcgtggactatcctggctactacatgaccaaacgcggatatcatcctcgagcagtcaactctggccatctttttactcagctatgaggacctgatcgtcgactttgctatctgcatgatgaatctcctcagcagcagatgcagtatttaccgaaatgaattccatgaataatgcagtaattagtagtgctttcatatctgatacctgttttaaacgatatatttgaaagttgacgaatatcggaaatagcttcctccttcttgatctgtaaatatacagttctaagctgtcataagactgactgtcatatgacaacgttgttagatttttgaatttttcgaatacagattcaggtcgttaataacgcactcaggttcttcagtaaggggcatattgtctatatcgaaaaccccatcatttttttgtggattatcattccgcagctctgcaaacagaggagtgagatcctgctgtgcttctcctcgctctgcgaccagttcgaacgttttattttttgccgcatcgttgctcagagctgttacaagaacctgggcgatttgctcccgggagataacaccatcttccggcgttcccgcatggcgtctgtccccctgaagcatgacgattctgtgctcatcatcattgttgtaatcaaaccagccgggtctgacgatagtgtagatatgcccactggctctgaccaggcgttcagagcgtctcttccagtcatgaacttcagtacgttgattccagctactgagccgctcagttacgccaatcgttgtcatcagggcgatgcgaacaggtgtatccatgaatattcgcaaaatgttacgtacaccgccgtaatctattgctctggcgccaatacgtccctgaccatcagagccgagtgtaaaaatgatggcatcaatatctttcggtaaatcggtaagtgtttcaggtattgaaacatcgccatagaaaatatctgttccacgagggagtaacttgattttccgccgattcctgaccagagtcacgggctgatggcccattgcaatagcagtattcacaacatgaataccaatacttcctgttgcgccagcaacgagtattctcatgataaaccttctgataattcagccttatttttgatacagccagaatatcaattatcattattgccagtaacgaggctaaaatgattgtgtctatgaacacccttcatgaatgcgctttgaagggaatgcttctacaaggaaatcatcaatgcttaaagaaaacttcaacgaactgcaaatctttcttgtggtggcaagagagcgaagttttaccaaagcagcgagcaaactcggcgtctctcagtctgcacttagccatgcaatgaaggcactggaggaaaggttaaatatccgtctcttaacccgaactacccgtagcgtggcccccacggaagcaggggagagaattattgcctgtcttgagccacgtatagatgagcttgagcgcgagctggaatcacttatccaactgaatggcgcgccatccgggaatattcgtttatcagccggggaacatgctgcacgcagtctggtctggccgaagttaaaatcgttcctcagagaatatcccgaaatcaatgtcgaactggtggtggataacggttttgtcgatattgttgacggtcgttttgatgccgggatccggctgggtgaaagtgtggataaggatatgattgcagtgcgaattgggccggatatgcggatggccatggtgggatcgccggcgtattttgctgcaaaccctgcgcctgaaacgcctcacgaactacaaaatcatcgctgcatcaataacgtaacgtggataaacctgcgaatcgtattgaagatatccacggtatggctgatttcatcagccagtatcctggtgttgatagcacccgtattggtttgttggggatttgcgggggaggagggtattcacttgctaccgccgagacggacaaacgattcaaatcgattgcaaccattagcatgtttaattcaggacttgtacggcgcaatggtatgcaggattcacagttggatactattcaacaacgtcttaagcaggcttcagatgcacgagctcaggaagtcgccggtagcgaagtgctttactccggtgatgccaacctgactgatgaacagatcgctaaattaccttttgcgttatatcgccagggctacgagtactactggaaaacccacgcacacccaaacatattcagaagcgtgagggatatagtgccatcaaagcgctggctgctgtaaacaacgcaattatccaactcatggtctatggtgtgccatcactgaacagaggttgaatttttctaccgaaacgggagggaagtcagaaatcacaacgtattgatttatctgtgtgtggatgtgaatggtgaagtaaaggaccttcacaggcaatttaacataatatacattatgcgcaccaacataaaccaagggagaatccagtcgttggcggttcatgattgttctgctcattaacaacgaccaaaaccccatatcttacttaataccgtattctcggcttaaccgaccgtgcaacctcaacacattggtttcaactgccgtcaccacgttctccggaaaatctgtcggtaatgaattcttcacgttatccagtgctgccggaatcattctggcaaagtcactcaggatttcatgcatctgcacttccgggaatttcagcacctttgctgtcgccagaaaatgtcgcggataaattttatcgattgccgtttttttgcctttggatgcgttaagccccattgccagtttgagatcgctgatgtgtattcccgtaccgccaaggaccggaaatgccgaaatgatgtcataaaatggtgtgagccgataactgccgccagcctgaataaatacggagaagttttttgcatggccatctgttgcgccaatcaaccactggaagacctgaaacttcataaaatcatagcgatctttcagcgcctcgctggaccccatcaaaaaagccataatttgcgcgataccggggcctccatctgattcatatttcaccgatgaaggtaaaccgaatgtctggcacatatcctcctgtggcaagcgaagtaaaaccgttcgctcagtattccaacgcctgtcaaaacgtttgaccgctaacgcgcgcacccttcccgctttaatgatttctgcgtccggaacattcaacccgagttctttcgccagcagcaaacagtaatactcattatcaacgctttggctaagatcgagcgtcgcattgggctgtctgatttcgccaatcggcaatttgataatgtgcgtcgttggcgttattcccttcggaatgcaccagtcattgcctattctgagcagcgcagtcttctcctgtgcgccagcaaccgagatgcgaaagtcattttcttctctaatcatgcctaacgggatatctgctttataagccgttaatacttcttcaagtctggcttcagtaagcttttcccatgccattatcggacacgttacggtttcatcttcggggattaacgtcacggcaccaacgctatctcgccctatttctgacaataaatcaaacggttgtctggatttagcatgataacgtttaacgatccggtcacgtacaatcgggctatcgggtaacaggttatcgaagaagttaaatacggcatcagaggtgatattccccctctgcaatggcagcgaaagtgacaacggtctggcataacggctggctaaccactcaggtgcatacttaaaggtgtgcgcgccgttggctaacttcgttaactcgcctacccgctggttgttcatccaagtgactagtttaggcattaccactccaaatcttgctgttctgctgcttctggcgaggcatttttcgcgtcgcatagcgtcattgagagttcaagcgactgtaaaatcttaaaaaatgtcgtgagcgaggtattgtcaggattgttttcgaaattggaaattgtcgcctgcttaatgccgatttttttcgccaactcgctctgcgtccagccgttttgctggcgaaccagtttcattgcattcgccaattgcgttgggctatagatcttctgaaagctcatcatgtcatacgtccacagcaaatttatccgcttaaggggatattatcagttttatcctttagtgaggataaagtcaatctggaaacacatcttatccgctctacgggataaacgctgcgatatccgcgatcgcggataaaaaggaggatttaaaaaagcacatcctaatgcggtggcttctttgactaccggaatctgtaatcttaatgacctggccgcgtaaaaaacgtctgttcaatggggtgatgccgtgaggcgaatttatcagttttatctacaattggggtaacgcgctgacgggagtaaaaaaatgtctgactggaacccctctttatatctgcactttgccgctgaacgatcgcgtccggcggtggagctgcttgccagggtgccgctggagaatatcgaatacattgccgatcttggctgtggcccaggtaacagcaccgcccttctacaccaacgttggcctgctgccaggataacgggcatcgactcatctccggcgatgattgctgaagcgcgcagtgctttgccagactgcctgtttgtggaagcagatatccgcaactggcaaccggaacaggcactcgatctgatttttgctaatgcctcgctgcaatggctgcccgaccactacgaattgtttcctcatttggtttcgttactcagtccgctgggcgtgctggcagtacagatgccagataactggctggagccgacccatgtgctcatgcgcgaagttgcctgggaacaaaactacccggatcgcgggcgtgagccgctggctggcgttcatgcttactacgatattctgagtgaagccggatgtgaggtcgatatctggcgaaccacttactatcaccagatgccgtcgcaccaggcgattatcgattgggtgaccgccactggattacgtccgtggttacaggatctgaccgagagcgaacagcagcattttcttacgcgctaccatcagatgctggaagagcaatatcccctccaggagaacggacagatattgctggcatttccgcgtctgtttattgttgcccgccgtacggagtaattatcacgtcagctggtaatggcgatcgggaagaattttcgctggaatttctgcttcatcgttcatctgtaacaggtcaatttcaatagcgttgcagatggcatccagcggtaaatcattgttttcattaccgaagggatcttccagttcttccgccagacaatccagcgaaataaaagtgtaggaaatcagcacagagataaaaggcgtcatgtaatgcaggtccacgaccagcgcaaacggcagcatgatacaaaacagatacacggtgcgatgcaaaatcagggtgtaggcaaagggaattggcgtataggcaatgcgctcgcatcctgccaggaccgctgaaatatcattaagccgatcgttgaggctaataaacaggatatctgaaagttgtccattgcgtcgctgaaccgccaaccactcccccattattaacaagatgtggttagctggagagttagaagccagtacacgctgaagatcttcagtcttgagataatgagccagcacttccgcctgtggctgtttgcgtaatgtcatgcgtaaacagtgggcgaaggcgatttgcagccgggcaaactcccttacacttgccgaatccggcaatgtcgtttttacctcgcgcagtaacgaccgcgaggcaatcatcaactgcccccaaagttttcgcgcttcaacgtaacgggcgtaaccggcattattacgaaaaccaagaaaaatggcgatggcgacaccgagaatgctgaacggtgcgagggtgaatttaatgcccaaatgcgtgtaccagggcagcatgaaaataacagcgatagaaaagagaaaattgagtagtaagcgcgaggatatcttggataatactgaaccgtgccagacaaaaatacggcgcagccagtgttgttgtggacgaacaatcatggttatcttcaggcgtggaaaagtcgccctattaaacgtgattacgatcacattctcaagacactacttacaaattacctacaagcttacaatattaacaggtgctgcatgtggcacctgttaatgataaagacgcataggatgttgtaactaatatagtgaaataagaaacccggtcgaaaccgggttcagagtattagcacaacgggcgtacagcttcgcgcatccctttttcgagaatcgcatccaggtcattagcaacctgctcgaccagaccaggcacttgcgtcaggtcctgctcccagtggtctttttctgccaacacaatcgctaccagttcctgggtcccgataacacggtcacgatactggctccagagttgctgataacgttccagccagtgtgcatcgtcctgtaccggatatgtttctccattacgctcaccgcgatagaacgcaatcaatgccgctaatgcgaaagtaaggcgcgccggaagtgtgccgtttgccttctgccctgccagcagctgcggcaggatgcgtgtgcggaacttggtcataccgttgagcgcgatagacagcagttgatgcttgatgtacgggttacggaaacgtccggtgactgcactggcgaaagactccagctcatcgcgtggcaaatccagtaccggaataatttcttcgtagatggctttttcaacgaatgcgcaaatttcagcatcgttcatcgcttcacctacggtatccagccctgcctggaacgccaccggcaccagcgcggtgtgcgcaccgttgaggattgccactttgcgttctttatacggtttaatatcgtcaacgatcagcacgttgagcggatatttgtccagacgaagttcagtcgctaaggatttcggcccctgaatcacaaacaggtaaaagtgttcagcggtgtcgaggaaaccatcgtggtagcccagttcttcttccagtttagccacttcatcacgcggataaccggtaacgatacggtccaccagcgtagaacagaagctgttagcctgatccagccattgaataaatgcttctggcagtgcccactcttgcgcatagcgcagcaccagttcacgcaacgcgtcgccattatagtcaatcaactcacacgggatgatgatccaacctttatccagcgcaccgttgaaatggctaaaacgttcgaacagcagacgggtcagttttgccggataacttaccgctggcgcgtcatcgaatttatcgcccgcatggtagctgatacccgcttcggtggtgttagagaaaacaaagcgcatttccgggttgtgagccagtttcaggaattcatcgtattcactgtagacgctgatttcacgattaaccgagcgaatcagacgcgcgtcgctgaccgcttcacccttctcattcaggccacggataatggtggtatacagaccatcctgcgtgctcagtgacggcgggaatgaagtttcaatcggacgaacaacgaccacgccagaattcagattggtgtgctcattcaggagatcgatttgccagtcaacaaaggcgcgcaggaagttaccttcaccaaactgaatgatacgttctggatactgtgcaccgggaaaatcgcgacgatttagtgttttcacaatgggttcccttctgattagtcatacaacctgtttgaattggtacgacaggttagcaaactttaatacgacgaacccttgttttgatcaactactgatgattaatgagcagttttatgagaaaagtgtggcgcggatcatggtttaatcgaggaaacaggccttttcttggatcataaagtggtagaacacattgcatttaattcgctctgagtaaataaagatgtcagacaacttcctcaccgtaacgcatagtgctggtacggttgcgcccatctttcttcgagcgatacagacacgtatcggcttcgaccatcaatttattaaagtcatcggtcagcgttcggtacgatgcgcaaccactaccgacgccaatacttaccgtgagataaagcgttttttgttgccaggtgaacggttgaagttctacgcctttacggattttttccgccattagcaggccatcgacaggattcaccgacggcactgcaacagcaaattcttcgccgcccattcgcgccaccagccccttatcaccgacaatcttctgaatatgctgggcaaacacgcttaacactttatcgccacattcatgtccatagttatcgttaatgcttttgaaatagtcgatatcaagcagcatgaccgtcagatgttgtgtctgtttcagcgatggacttttcagcgcctcataaagaccagaccgtgagtaaacctgagtcagaaaatcaaagtcggctcgcagcgcaacttgcttcattagcgaattgatcgctgccacgctaaaggaaaccataattgggcatatcgccatcgtggcaataccgagacgtgcggagaacatttgcggaatagagaacggcgaaccgaccgagatatcaatcaccgaatttgccaccagtacgacttccaccgcaccggtgacaaaggtcaacagacatgttacctgcggcgtatagcgcactgcacaccagattaatgcagggagcggaaacgccagactccccgctccgccaatgactaccgaggcaataaccgacacaataagcgcgatagcaggcatcatctgctctgctttaaagcgcggcagtactccaggaattgccaacgtcagcatacaaggcacgatcaacacgcccgttgagaattgctcactaaaccagtcggcaagcaaaggccagaaatccagactatcaatactgaccgaaccaatcgccccgacaatagcgcataataatgcggcaagcagacagtaattaaatagccgtaaggcacttactggctcatacttattttttcccagacgcttatcccccgcgaccagtaaggcgacggtaacaataaacatcatattggagaaattgatagccagtgaaaccagcccccattcggtggttatggcatcataaaccagcatcgccacataactgatcgcatagtaatgcagtcgattaagccagacatagcgggcaaacacccccgccattacgccattcagcggccagaaaagagaaagttcgtgaaccagccgtaactctgcaccaataaaatagaacagcgtggttagcacaaaaatagcgatgctattacgtagcagatgaccttcctggaacaaacggaaagttgaaatgggctgtacatgcattaattatctgtccatacaattgcgggtggcaattatctcaacgcaataagtaaattcttagaaaggatagcatgttcgctgacaacggcggcaactaaagatacctaatgaatgccattttatcgatttccgtaattatcatggctgattcatctgtataaccagccagtggtagattaccgtcacaatataacgttgttgctcctcacttaacgcttccccctgaggaatgttatgccacttagccagacaaccgcgacaacaggtcgcggtggcgtgttgagcgataaaaaccggatgcccgcgcatgggggtttgcttaccgtcgttagccggtaatgccggagcaagacgtttagcgacaaaatccgccgcatgttgttcaatgactggcgcgcctttctccagacaatactgacgctctttcacacccaaacgaaagcgagagcgaaattttgaacgggataaacgcgcgaagagtggatcgagagactgcattaataaactgaacgccctaattgtttcgtcaattgttcaaggacggcaatgcccgcaagcgagttaccggcatcatccagttccggactccagactgcgatggccatttcatgcggaacaatcgccacaataccgccaccaacgccagattttgccggtagtcccacccgccaggcaaactcccccgcgttctggtacataccgctggtcgccatcagcgcgttaatttgccgcgcctgcattggcgtcaccacaggttcatcaatatgaatagctttcccctgattcgccagaaagacaaacgtccgggccagctctacacagctcattttcagagcgcagtaatgaaagtagttttgcagaacggttgtcacgtcatgatggaaattgccaaacgacttcatcagccaggcgatagccgcatttcgcgcggaatgttcaaattcggaacgcgctaccaccgtatcgtaggaaatatcagacacaccacttaagccgcgcacgacttccagcatacgttgccgaggtgcgcttaatcgcccttgcaacatatcgcagaccaccagcgcaccggcattaataaacggattacgcggaataccctgctccatttccagttgcactaaagaattgaatggtgatccagacggatctttgccgacgcgttgccagatttcctcttcggagtaatgacgcatggcgacaacgagactcagcactttggaaatagactgaatggaaaaacgttcttgcgcgtctccggcctgaaaaagctgtccgtcaacggtacagatagcaatccccaatcgggaaccgtctaccgtagccagcgccggaatataatccgcgactttaccctgaccaatgagcggccgcacttgccgcaagatgttttctaaaattgcattatccatggcgactgccactttctactcctggaccgcaggtctgaaaagacctgcgagtatatcagagctgaatatgtagcgtcagatccggtctttccacaccgtctggatattacagaattcgtgtaagccaaaatgggaaagctcacgcccaaagccactcttcttcacgccaccaaaggcgactcgcgcatcgctggcacaataaccattgataaacaccccaccgcattccagacgtgccgccatctgtctggcctgtgtttcgtcggtggtgaaaatggtcgctgaaaggccgaactcactatcattagccagttccagcgcatgttctgcatctttcgcaatggtgattgccgcaacggggccaaacatttcttcccgaaacgcggtcatttctggggtaacattcgccagaaccgttggcggatagtagttacctgccccagccatcttttccccgcccagtaacaaacgcgcaccctgcgccagtgttttttccacctgatgatgcagctcatcacgtaaatcaaaacgagccattggtccgagagcgttctcttcatcacggggatcgcccattttcaaggctgccgcagctgccacaaaacgttcggtaaatgccgaagcaattccctcttcgatgataaagcgttttgccgctgcacaaacctgtccggtattctgataacgtccggctaccgccgctttcaccgccagttccagatcggcatcgttaagcacaataaacggatccgaaccacccagttccagtacgcattttttcagtgccgctccagcctgtgcgccaatagccgctccagcacgaacacttccggtcactgtgacagcagcaatgcgcgagtctttaatcatcagactgacaccgtcgttgtcggcattcagccagccatatacgccttgtgggatacccgcatctttaaacacctgggcaatgagctgtgcacagcccatcacattcggcgcatgtttaagtaagtagccgttaccagcaagaatgatgggaacagcaccacgcatcacctgccataacggaaaattccacggcataatcgccagaatcgtccccaacggtcgatactcaataaccgcctgctgattttccaccagcgtaggttccgctttcagcattgctggaccatgttctgcataccagtcacacaaattcgccgatttcgccacttcagcgcgcgcctggttgattggtttgcccatttcacgggtgatcatttgcgccatttcttcgctacgggcgcgcagagccttaccgatatcacgcagtttttcagcacgataatctatatttgcctcgcgccagtcgcgaaagcctgctgctgccagctgaagcgcgttttcgatatcgtcaacaccagcccacggcagcacagaaagttgttcaccggtggcaggatttatcgaaattgcatgagttgccggagtaatggtcatcggggtatctcctttatgagtcatggtatgaagatacgcagatttactcttgctttaaaatgaataatattaagccacttattcacgaatcgagaatgttatggatctgacccaactggagatgttcaacgcggttgccgaagctggcagcattacccaggctgcagcaaaagtgcatcgcgtgccgtcgaatctcactacccgtctacgtcagcttgaaacagaactaggggttgatctgtttattcgcgagaatcagcgtttacgtctctcgcctgccgggcataactttttacgctatagccaacaaattctcacgttagtggatgaagcgcggagcgttgtcgctggcgatgagccgcaaggtttattttctctgggatcgctggaaagcaccgctgcagtgcgcattccggccacgctggcggaatttaaccgtcgttatcccaaaattcagttttcactttccaccggcccttccggcactatgctggaaggtgtgctggagggaaaactgaatgcggcatttattgatgggcccattaaccatactgccattgacgggataccggtataccgcgaggaactgatgatcgtcacgccacaaggacatgcgccagtaacccgtgccagtcaggtgaatggcagtaacatttatgccttccgcgccaattgttcgtatcgtcgccacttcgaaagctggtttcatgctgacggtgccgctccgggaactattcacgagatggagtcttatcacgggatgttggcctgtgtggtcgcaggagcaggcattgcgcttattccacgctcaatgctggaaagtatgccggggcatcaccaggttgaagcgtggccgttagctgagcaatggcgttggttaacaacctggctggtctggcgtcgtggtgcgaaaacgcgtccgcttgaggcatttattcaactgctggatgcgcctgactcggcaaaacagggttaccaatgagctatttttgatagttcatacggctaatatgctctatatagtgatgttccgatgacttatgactatatggggcaaatatggttacgccagtaagcatcagcaattacatatctcttcctgatgattttcccgttcgtaatattgcacctcaagtaaaagaagaacaggcccccttcctgatcgtcattaaaatgtgatgttaacaactctctgatgcgtgacagaacaaccgtcagagagatggaaatgcgatccagatcacaaatgcattgtattcacatcattaaccgttttaagatcatttcatcactttttcgcaactcacccgataatctgttatgacaacaaacactgtttcccgcaaagtagcgtggctacgggtcgttacgctggcagtcgccgcctttatcttcaataccaccgaatttgtccctgttggcctgctctctgacattgcgcatagttttcacatgcaaaccgctcaggtcggcatcatgttgacaatttatgcatgggtagtggcgctaatgtcattgccttttatgttaatgaccagccaggttgaacgccgcaaattactgatctgcctgtttgtggtgtttattgccagccacgtactgtcgtttttatcgtggagttttaccgttctggtgatcagtcgtattggtgtggcttttgcacatgcgattttctggtctattacggcgtctctggcgatccgtatggctccggccgggaagcgagcacaggcattgagtttaattgccaccggtacagcactggcaatggtattaggtttacctctcgggcgcattgtggggcagtattttggctggcgaatgaccttcttcgcgattggtatcggggcgcttattacccttttgtgcctgattaagttacttcccttgctgcccagtgagcattccggttcattgaaaagcctcccgctattgttccgccgcccggcattgatgagcatttatttgttaactgtggtggttgtcaccgcccattacacggcatacagctatatcgagccttttgtacaaaacattgcgggattcagcgccaactttgccacggcattactgttattactcggtggtgcgggcattattggcagcgtgattttcggtaaactgggtaatcagtatgcgtctgcgttggtgagtacagcgattgcgctattgctggtgtgcctggcgctgctgctacctgcggcgaacagtgaaatacacctcggggtgctgagtattttctgggggatcgcgatgatgatcatcgggcttggtatgcaggttaaagtgctggcgctggcaccagatgccaccgacgtcgcgatggcgctattctccgggatatttaatattggaatcggcgcgggtgcgttggtaggtaatcaggtgagtctgcactggtcaatgtcgatgattggttatgtgggcgcggtgcctgcttttgctgcgttaatatggtcaatcatcatttttcgccgctggccagtgacactcgaagaacagacgcaatagttgaaaggcccattcgggccttttttaatgatacgttttaatgatttccaggatgccgttaataataaactgcacgcccatacataccagcaggaatcccatcagacgggagatcgcttcaataccacccttgcccaccagccgcataattgcgccagagctgcgtagacttccccacaaaataaccgccaccaggaaaaagatcagcggcggcgcaaccatcagtacccaatcagcgaaggttgaactctgacgcactgtggaggccgagctaataatcatcgcaatggttcccggaccggcggtacttggcattgccagtggtacaaaagcaatattggcactgggttcatcttccagctcttccgacttgcttttcgcttccggtgaatcaatcgctttctgttgcggaaagagcatccgaaaaccgataaacgcgacgattaagccgcctgcaattcgcagaccgggaatcgaaatgccaaatgtatccatcaccagttgcccggcgtaatacgccaccatcatgatggcaaatacgtacaccgaggccatcaacgactgacgattacgttcggcactgctcatgttgcctgccaggccaagaaataacgcgacagttgtcaatgggttagctaacggcagtaacaccaccagccccaggcctattgctttaaacaaatctaacattggtggttgttatcctgtgtatctggtttatcagcgaaaagtataaggggtaaacaaggataaagtgtcactctttagctaaccttgcatcgcattgaccaaaacttgaaccgatttagcaaaacgtggcatcggtcaattcattcatttgacttatacttgcctgggcaatattatcccctgcaactaattacttgccagggcaactaatgtgaaaagtaccagcgatctgttcaatgaaattattccattgggtcgcttaatccatatggttaatcagaagaaagatcgcctgcttaacgagtatctgtctccgctggatattaccgcggcacagtttaaggtgctctgctctatccgctgcgcggcgtgtattactccggttgaactgaaaaaagtgttgtcggtcgacctgggggcactgacccgtatgctggatcgcctggtctgtaaaggctgggtggaaaggttgccgaacccgaatgataagcgcggcgtactggtaaaacttaccaccagcggcgcggcaatatgtgaacaatgccatcaattagttggccaggacctgcatcaagaattaacaaaaaacctgacggcggacgaagtggcaacacttgagcatttgcttaagaaagtcctgccgtaaacgaaaaaagaggtatgacgatgtccagacgcaatactgacgctattaccattcatagcattttggactggatcgaggacaacctggaatcgccactgtcactggagaaagtgtcagagcgttcgggttactccaaatggcacctgcaacggatgtttaaaaaagaaaccggtcattcattaggtcaatacatccgtagccgtaagatgacggaaatcgcgcaaaagctgaaggaaagtaacgagccgatactctatctggcagaacgatatggcttcgagtcccaacaaactctgacccgaaccttcaaaaattactttgatgttccgccgcataaataccggatgaccaatatgcagggtgaatcgcgctttttacatccattaaatcattacaacaactagttgataacgtgacaacgtcactgaggcaatcatgaaaccacttttatccgcaatagcaactgcgcttattctcttttctgcgcagggcgttgcggaacaaaccacgcagccggttgttacttcctgtggcaatgtcgtggttgttcccacatcgcaggaacaaccaccgtttgatttaaatcacatgggtactggcagtgataagtcggatgcgctcggcgtgccctattataatcaacacgctatgtagttattgtcaggctctgatcacagagcctgacatttccgtaatatcttcctgaagtctcatatattttcgccattgttggcgatgagatcccgataccagtaaaacgatgctttacgtatccgttccagcgttcccttcccttcgttgtctttatcgacataaatcattccgtagcgttttttcatttctcctgttccggcagaaaccaggtcaatgcaaccccacggggtgtagccaattaagtcaacaccatcttcaactacggcttttttcatttcccgaatatgggaggaaaagtaatcaatgcgatagtgatcgttcaccgtgccgtcagcttgtctctggtcaaccgcaccaaatccattttcgacaataaacagcggcaactggaaatgatcccagaaccagttgagtgaataacgtagccctgccggatcaatttgccatccccattcggatgtatcgatataagggttgctgaccaaatctcgtggttcaacataatccagttgcggattatctggcgaaaattgcgtcgtaaaagacatgtagtagctaaagccgataaagtcgacacaacctctggcaagaatcgcgttatcatctggtgtgatatcgaggttgaatcctttccttgcaaagtaattcagcatatgttgcggataatatccacgagcatgaacatcagtaaaccagtaacgacgatgcatcgctttcgtggccatcatcatatcgttgggtgcacacgtcagaggatagatggggcacatagcaatcatacagccgatattaaattcaggattgatcagttttccagtctgtaccgccagggcactggcaactaactcataatgtaccgcctggtacattatttgttcgcgctcattgagatcttcctctggcgaatacaagataccggaattagtaaatggacacaggctttcgctgaaattcacctgattattgatttcgttaaacgtcatccagtactttactttttctttatagcgcgtgaagaccgttgatgcgaagtggataaaaaagtcgatcagtttacggtttcgccagccaccatattttgtcaccagatgataaggcatctcaaaatgcgaaagcgtcaccacaggttccattccctgcttcaggcattcatcgaagagatcatcataaaattgtaaaccctcttcattcggctcctgttcgtcaccttgcggaaagattcgtgtccaggcaatggaagttcgaaagcatttgaatcccatcccggcaaataactgaatatctgttttatagcgatgataaaaatcaattgcttcatgattgggataattaagtccgtcgataacgccttctgtcacttcacgcggcaccccgtgagcgccagcagtcattacatcagcgatactgatgccttttcctccttcattccagccaccttccaattgatgtgcggctaccgcaccgccccataaaaaatcttttttaaatcctgacatacacaactccttaactaaaatagattaccaccagacttccacctggatgccggccataaactcgtttttgctgttctcattaaacttaaaattcgataattcgttatccagaatattgatatacgtcccgtagaagcgaatttctggtcgtgaacctaaaatactttcacccactttcaatgcatgccagagtgtcgttttataagccgattcatttagcgttaccccctgctgagttttgttctgttgcttaaaccagcctaattcaagccccgtctgattccatgtattccagatccaggccggtcttattacggtgcgaatactgtcaaaatcactatgagcgccactttcataactataaacatcttcgccatgagaatagacaagcgcgttagccataataatattgtcagtcagatacatctcgccctgagagattaaacgccaggcgatcccattggtatggtcaccatagtaatagcgaccatgcgccatcgtattactggcatctgagaaactggcaaaactgctggcataggaattattggcaacctgtaacgtaaattcattaaacgtatcgcgttgcaagttttgccgtaaaacagaagtcagcatccagctatctttcatttcaaaataactgtcgtcattttcattatcttgttgttgatccgttttattaggtgcggaatatttagccattaatgacaacgtcgcatcatcccataacgggatattgcgataacgaacatccacagaattggtattcatctgactggtacgcgtaaaatcacgagagtaaacatcgacatcatctcggcttaaggacatatcaaacagccctacaccaagcgcccagttttcaatccccacacccgcggcaacatccgtggttaaggttttccagtccagcatttggatctcatattgcgggagtttatgtttgccgacccagaagtctgcctctcgtgcgaagggtaaaaaacctcgcgttgtcagataaatatcactgaactgcatgatattttcattggcactgtcaccaaaccaggcatcgttatactgctgacctacgtttccatcataggtaacgaccgcatttgccgttctaccgtcctgattataaacacgctgatttaaggtcaggtcaaaccaaccactcatctcgttaccaaaacgtcccagagaacccgctgcataagtttgtggtgagccgtgattaccggtgccccagcctgagcggaagtacccctgatagctgaatccaatatcatcctttatatatttactgatatctttcagggtcacgctttcgatagtggttttatcgcctttactttcaataacggcaatttgctgcgatccatttatagtatgtgctgcggcagacgagttctgttcaccgttttcatttttgatgttatcagcaacgggagatgtcgctgatatttcggcaagcgaggccgattgatatttattttctgtgatgcttttttgtaatgtcgaaagtcggaatttatatactcccagttcattctgtgttgctttcagctcttgtttattttgcgacaattcattttcaagcaattcaaggcgctgctctatggttaattttgttgccatcgcgttcaacggaaacaatgctgtaataatagaaatagacaaaaggctgacgttaagcgtctttatattcataacttatccttaagagtgtagtaatttcctccagatatcgcactggagaaaaaatcaggcatggagctcttttcttaatgaaataatttccctggctaaatcctggcataatattgcattcatcaaatgatcctgtgcatgtatcagaattaaattaacttctattttgccacagccttcatcctgactaattaacgcggtctgaatcttatgcgcctgaagacaggcagattcagagctggccattagtttagttgcgccctgccagtctttttgcccggcacaacgtatggcttccatcgcatcagaacgagcctgtcccgcgttgatcagtaactccataacaagttcttcatctgcaaacatcacaatctccttcctgggtaaatggaattatccgttagttgtcatgttattgactttgttggcggcgataacaaaaggtaaatagatcattgtcgccacacctaaacataaaaaaccaaccagtaatgccagccagtttcccccggttccgaggaaagcaattaaaggtccgggcgtagtccagggcacggcataagcaaccggtggaataatttccatcgaaacaaagaagtaaccaatggcacagttaacaatgggaaccataataaacggcaccatcatgatggggttaagtacaataggaaggccgaacattatcggttcattgatattgaaaataccggggataaatgacatttttgccagatcacggtattccgcacgcttagaagcgataaaaatagccaacaataaccccaacgtcatacctgaaccgccgcagttggcgaatgcatcattaatagaagtccaggtaatcggatatggcgcgccccaggtagtgccgtgttgagcggcccaggagagattctccagattagcctcagaaaaaacggtttctcgaattgccgacgttgtattaggtccgtggatccccagcacccagaggaaattacccacagcccccaggataattaccgcaaagatattcgttcccatatgtttgagcggcgtctggattaatgtgtaaatgagatcatttaatcctgccggggatatcaatgtcaggcaataattaagtgcggaaaagaacaccatgacaaaaaatattggcaataaaactttaaatgaacgcgctaccgcaggaggtacagctgccggcatcgttatggtgattttggggtttcgagctaagcgacaaaatatttcactggtgatcaatgcaacgataacagcaacaaacaacccctgcgcgccgagatatttggtcgtcaggaatgcctgcccatctatcatctggtatggggtataaacaataaaaaatgctcctattgccgttaatccgcataaaagatcatcttgctcatagctaatcgccacattcctggcgaccaggaaagcaatcataattgacatgatatttacagaaccattcattaccggagtaaaaatagcttgtgctttttcaaggttggggaaaatgctgttcagatgcagtaatccggcaataaaaccgtcgggcgataatatggcaaagttaattaatataattaatgagcttgccatgataattggaaacgtaaaaacgaatccatctctcaccgctgcaacatgtttttgtgagtttaacttgatagcaactggaacaagaaaacgttccattccacgttcgaatgatgccattaatcccatttttttatacctgttgtcctggatatttatacatcccaataaagcatgtatgccatatccattttatgatgtgtgaaaagttagttcaggtaatagtttaataatattagattcttactcttgcagtagtttcatcgcaaattcaagaactgcctgtccgttcattgtgccatagtctttcatctcgataacggctacaggcattttcccctgtgcaacggcttcaatctctggtttctgaaagcgaacttgcggaccaagtaaaacaacgtcaacttcgttatttttaattttccctttagcctctgcaatcgccaatgcggaaatattaacttcaagtgaaatagcggtagcatgatcaatcatacgtttaaccagcatactggttgacatgcccgcagcgcaaactaacaatatctttttcatatttttccttactggtatataacagactacattgtgtaaatatcatatcccacagtagctacacgtcctggtacattgatcacagtaatacagcaataaagttgttcaacaacagggtgataattaaacgactcggccatacgataaactaatcaggtctcaactccttgttttcaatggctcttaaaaggtgcaaaagtgatttttcaaaagattgcccgcttacttaaatccgagatcaatggcaattcatggcatgttggtgatttgttgccgtcagaagcggaactcgctgttcgttataatgtttcgcgtaataccctgcgtaaggcattatccctgctggaaggcgaaggaattattcacagaaagcatggttcaggaacatacattcaaaaaaagaattttgttgcacacattgatcacatgaacagtttcagtgaaattgcacataaaagcggcaaagaggcaggaagtcagattatgaaatttgaagtgcaggatgcttctcctactattgcgactgagctgaatttagtgactggtgagcaggtttattacataaagagactgcgattcattgaggataatgcagcacaattagaagaaacgtggatgtcagtggcacgttttcctgatttaaccgtatcgcatatgcaaaaatccaaattttcgtatattgagaacgaatgcgggatcaaaatcattggcacctttgaaactttctccccgacttttcctacccctgaaatcgccagtattttacggatcagcccacgggatcccatacttaaaattcagacccaggctgtggatagtaactctattccgctggattattcgttactttacagcaatattttcgagttccaggtaaagtactttttcccgcgataaaagcagacgcacagagtgctggcatcacattctgtgcgtatggtttagcctctgacctttaccgctttacgccaccgcaagccaaatacattgatatacagcccggtcataatgagcaccgcaccgaaaaattgcagacccgttaagcgttcatccaacaatagtgccgcacttgccagtccaactacaggcaccagtaacgataacggtgcaacccgccaggtttcatagcgtcccagtaacgtcccccagatcccataaccaacaattgtcgccacaaatgccagatacatcagagacaagatggtggtcatatcgatagtaaccagactgtgaatcatggttgcggaaccatcgagaatcagcgaggcaacaaagaagggaatgattgggattaatgcgctccagattaccagcgacatcaccgccggacgcgttgcgtgcgacatgatctttttattgaagatgttgccacacgcccaactaaatgctgccgccagggtcaacataaagccgagcatcgccacatgctgaccgttcagactatcttcgattaacaccagtacgccaaaaatcgctaaggcgatccccgccaattgtttgccatgtagtcgttcaccgaaagtaaacgcgccaagcacgatagtaaaaaacgcttgtgcctgtaacaccaacgaggccagtccagcaggcataccaaagttaatagcgcagaacagaaaggcaaactgcgcaaaactgatggttaatccataccccagcagcaaattcagtggtactttcggtcgtgcgacaaaaaagatggccgggaaagcaaccagcataaagcgcaaaccggccagcatcagcggtggcatgttatgaagccccactttgatgaccacaaaatttagcccccatacaaccactaccagtagcgccaacaccccatcttttcgcgacattctaccgcctctgaatttcatcttttgtaagcaatcaacttagctgaatttacttttctttaacagttgattcgttagtcaccgtttacgacggcattaatgcgcaaataagtcgctatacttcggatttttgccatgctattcctttacatctctaaaacaaaacataacgaaacgcactgccggacagacaaatgaacttatccctacgacgctctaccagcgcccttcttgcctcgtcgttgttattaaccatcggacgcggcgctacgctgccgtttatgaccatttacttgagtcgccagtacagcctgagtgtcgatctaatcggttatgcgatgacaattgcgctcactattggcgtcgtttttagcctcggttttggtatcctggcggataagttcgacaagaaacgctatatgttaatggcaattaccgccttcgctagcggttttattgccattcctttagtgaataacgtgacgctggtggtgctcttttttgcccttattaactgcgcctactccgtttttgctaccgtgctgaaagcctggtttgccgacaatctttcgtccaccagcaaaacgaagattttctcaatcaactacaccatgctcaacattggctggaccatcggtccgccactcggcacgctgttggtgatgcagagcatcaatctgcccttctggctggcagctatctgttccgcgttccccatgcttttcattcaaatttgggtaaagcgcagcgagaaaatcatcgccacggaaacaggcagtgtctggtcgccgaaagttttattacaagataaagcactgttgtggtttacctgctctggctttctggcttcttttgttagcggcgcatttgcttcatgcatttcacaatatgtgatggtgattgctgatggtgattttgccgaaaaggtggtcgcggttgttcttccggtgaatgctgccatggtggttacgttgcaatattccgtgggccgccgccttaacccggctaacatccgcgcgctgatgacagcaggcaccctctgtttcgtcatcgggctggtcggttttattttttccggcaacagcctgctattgtggggtatgtcagctgcggtatttactgtcggtgaaatcatttatgcgccgggcgagtatatgttgattgaccatattgcgccgccaggaatgaaagccagctatttttccgcccagtctttaggctggcttggtgctgcgattaacccattagtgagtggcatagtacttaccagtctgccgcctttctcgctgtttatcatcttagcgttggtgatcgttgttgcgtgggtgctgatgttaaaaggaattcgtgcaagaccgtgggggcagcccgcgctttgttgatttaagtcgaacacaataagaatttaattcagccttcgtttaggttacctctgctaatatctttctcattgagatgaaaattaaggtaagcgaggaaacacaccacaccataaacggaggcaaataatgctgggtaatatgaatgtttttatggccgtactgggaataattttattttctgggtttctggccgcgtatttcagccacaaatgggatgactaatgaacggagataatccctcacctaaccggccccttgttacagttgtgtacaaggggcctgatttttatgacggcgaaaaaaaaaccgccagtaaaccggcggtgaatgcttgcatggatagatttgtgttttgcttttacgctaacaggcattttcctgcactgataacggatcgttgacacagtagcatcagttttctcaatgaatgttaaacggagcttaaactcggttaatcacattttgttcgtcaataaacatgcagcgattccttccggtttgcttaccctcatacattgccctgtccgctcttccaatgaccacatccagaggctcttcaggaaatgcacgactcacaccagcagtcacggtaatgttgatatgcccttcagaatgtgtgatggcatggttatcgactaactggcaaattctgacacctgcacgacatgcttcttcatcattagtcgctttgacaataatgataaattcttcgcccccgtagcgataaaccgtttcgtaatcgcgcgtccaactggctaagtaagttgcgagggtgcgtaatactacatcgccgattaaatgcccgtaggtatcattaaccaatttaaatcggtctatatccaacaacattaaataaagattcagaggttcagcattgcgtaactgatgatcgaaggattcatcaagaacccgacgacccggcaatcccgtcagaacatccatactgctacggatcgtcagcaaataaattttgtaatcggttaatgccgcagtaaaagaaagcaacccttcctgaaaagcgtcgaaatgcgcgtcctgccagtgattttcaacaatagccagcattaattccctaccacagttatgcatatgttgatgggcagaatccattagccgaacgtaaggtaattcatcgttatcgagtggccccagatgatcaatccaccgaccaaactggcacagcccataagaatggttatccgttatttctggcttactggcatctctcgcgaccacgctgtgaaacatacttaccagccactggtagtgggcatcgatagccttattgagatttaacaagatggcatcaatttccgttgtcttcttgatcattgccactcctttttcacagttccttgtgcgcgctattctaacgagagaaaagcaaaattacgtcaatattttcatagaaatccggagttatgagcatctctgagataacattgtgatttaaaacaaaatcagcagataaaaaagtgtttaattctataaattaactctgcattatcgcaattaaaaggatgacaaatagcataacccaataccctaatggcccagtagttcaggccatcaggctaatttatttttatttctgcaactgagtgacccgaacgacggccggcgcgcttttcttatccagactgccgctaatgttgatcatctggtccggctgaatttgaaaattattataacggaagagtatacaaaaaaagtaattttgctggcgactgcgaaacggcattcgcattagcggtgaagtttgccctcgcccagttgctgcaattactgctataacgaagctggtctggcgataaatccaggccagccattggtggtgtttatacgttcaagccacgatgttgcagcatcggcataatctgaggtgccttaccgcgccattgtcgatacaggcgttccagatcttcgctgttacctctggaaagaatcgcctcgcgaaaacgccgcccattttcacgcgttaatccgccctgctcaacaaaccactggtaaccatcatcggccaacatttgcgtccacagataagcgtaataacctgcggcatatccgccaccaaaaatatgggcgaaataactgctgcgatagcgtggcggtatagcaggaagatccatattttccgccaccagcgcccacaattcgaaatcatcgacgtcctgcattgcttcgttttcttccaggcaatgccagcgcatatcgagaagtgcggcgctaagcagttcgctcatctcataccctttattgaacagactggcattacgcattttctgttgaagttcgtcaggcattgcggccccgctctgataatgccgggcgtagcgagcaaatacctgcggatgtgttgcccagtgttcgttgatttgcgacggaaattcgacaaaatcacgcggcgtgttggtgccggaaagcgtggcataacgctggcgggcaaaaaggccgtgcagcgtatgaccaaattcatggaataaggttattacatcatcccagagtaacaacgcaggctcaccggcagcgggtttctgataattgcagacgttataaattaccgggtgcgtttcattcagcgttgattgctcaacaaaattgcccatccatgcaccgccgctttttgaatcacgggcgaagaaatcaccgtaaaataacgccagccccacgccattatgatcaaaaatttcccacacacgaacgtcaggatggtagacaggaatatcaaaacgttcgacaaacttaataccgaagagctgattcgcagtccagaatacgccttcattcaacaccgtgtttaattcgaaataaggcttgagctgcgcttcatcgagatcgaatttctcacgtcttacctgctcggcataaaatgcccagtcccacgactgcgcgctaaacccgccctgctgcttatcgataatcgcctgtatcgaggctaattcatcgctcgcacgttgacgcgccgctggaacaatttcccgcataaagttgagcgctgcttctggcgtttttgccatctgatcggcgattttccatgcggcataatgaggaaaaccaagcagtttcgcctgctgcgcgcggatctccaccagacgttgaatgatagcgcgggtatcattggcatcatttttttccgctcgcgtccagcccgcagtaaacagtttttcacgcgtcgcgcgatcgcgcagttcagcaagcgctggttgctgggtggtattcagcagcggaatcagccagttgttatccagacctttctcgcgagccgcctctgccgccagcacaatctcttgttcactcattcctgccagctgcgcgatatcgttcacaaccagaccgccggatttatttgctgccagtaaccgctggttaaactggctggtcagggtcgcagcttctgtattcagtacttttaattttgctttatcagcttgctcaagtttggctccggcaaggacaaaacgttgatgaatcacctccaccaggcggatggattcactatcaagccccagggattcacggcgttgccagacagcatctacccgcgcgaataattccccgttcagatagatatcattcgcaagttccgccagttcagcggaaaactgttcatcaagacgctgtaattcatcattggtatgcgccgcagtcatcgcaaaaaagacgctggtaacgcgggtaagtaattctccgctttgttccagtgccagaatagtattgttgaaatcaggtgtttgcgggttaagcgcgatggcagctatttctgcccgcttttgctgtattccctcatcgaatgccgggcgatagtgatggttggcaatttgatcaaaatggggagccagatacggcagtgtgctttgcacaaggaaaggattcattgttgtcattttcttctcctgaacgcgaggtgttccatagcgtaggcttactgataacggagtgcaatcttgcaaaccagtattacccgctcttaagcatcacgtgctatgttattgacacacaaaagcgttgaggaacagtgagatgatcgttttagtaactggagcaacggcaggttttggtgaatgcattactcgtcgttttattcaacaagggcataaagttatcgctactggccgtcgccaggagcggttacaggagttaaaagacgaactgggagataatctgtatatcgcccaactggacgttcgcaaccgcgccgctattgaagagatgctggcatcgctccctgccgagtggagcaatattgatatcctggtaaacaatgccggcctggcgttgggcatggagcctgcgcataaagccagcattgaagactgggaaacgatgattgataccaacaacaaaggcctggtatatatgacgcgcgccgtcttaccgggtatggttgaacgtaatcatggtcatattattaacattggctcaacggcaggtagctggccgtatgccggtggtaacgtttacggtgcgacgaaagcgtttgttcgtcaatttagcctgaatctgcgtacggacctgcatggtacggcggtgcgcgtcaccgacatcgaaccgggtctggtgggtggcaccgagttttccaatgtccgctttaaaggcgatgacggtaaagcggaaaaaacctatcaaaataccgttgcattgacaccagaagatgtcagcgaagccgtctggtgggtgtcaacgctgcctgctcacgtcaatatcaataccctggaaatgatgccggttacccaaagctatgccggactgaatgtccaccgtcagtaatttttatacccggcgtaactgccgggttattgcttgtcacaaaaaagtggtagactcatgcagttaactcactcacaagcaagaacgaatgaccgtcgaaacgcaacttaatcccacaccgcctgtcaatcagcagatttatcgtattcttcgccgcgacattgtccattgcctgattgcaccaggcacaccgttgtcggaaaaagaagtttctgttcgtttcaatgtgtcacgccagccggttcgcgaagcctttattaaactggcggaaaacggtctgattcaaattcgtccgcagcgtggcagctacgtcaacaaaatttccatggcccaggtgcgcaacggcagttttatccgtcaggccattgagtgcgcggtggcgcgtcgggcggcgagcatgattaccgaaagccagtgctaccaactggaacaaaatcttcaccagcaacgcattgccattgagcgcaagcaactggatgatttttttgaacttgatgacaacttccatcaactcctgacgcagattgccgactgtcaactggcgtgggataccattgagaacctgaaagcgaccgttgatcgcgtgcgctatatgagcttcgaccacgtttctccaccagaaatgctgttacgccagcatcttgatattttctctgccctgcaaaaacgtgatggcgatgcggtagaacgtgcaatgacgcaacatttgcaggaaatcagcgaatccgtgcgccagatccgccaggaaaacagcgactggtttagcgaagagtaattcatttcctctcatcccatccggggtgagagtcttttcccccgacttatggctcatgcatgcatcaaaaaagatgtgagcttgatcaaaaacaaaaaatatttcactcgacaggagtatttatattgcgcccgttacgtgggcttcgactgtaaatcagaaaggagaaaacacctatgacgacctacgatcgtaaccgtaacgcaatcaccactggcagccgtgttatggttagcggcaccggtcacactggcaagatcctgtcgattgatactgaaggtctgaccgctgagcaaatccgccgcggaaaaaccgtagttgttgaaggttgtgaagagaaactggcaccactggacctgattcgtctcggcatgaactaagcgtgtgaatgccgccgatggcggcattgctttttttacttcacggaatatttcgccacggtcgctttcgcgccatgcgctaataaagacaagtacgcttccgttacttttgtcgtaaacaaactattgcctggtaaatcatcaccaaagatcgccttaattgccagcagtgactggacgcgcgctgtcccttcagcactactttgtactgccttctgaataacaggtaacagtggatcactgatttctatcggatttccctgttcatcaacaccaccgacataacgcatccaacctgcgacgcccagcgccagcagatcgaacttgctgtcatgcgccagatgccagcgaacagaatccaacatccgctgtggcaatttctggctgccatccatcgcaatctgccaggttcgatgacgtaacgccgggttgctatagcgttcaattaatcggttagcgtaatcttgcaaatcaacgccctgcactttcagcgtcggcgcttgttcctgcaacattaaggtatacgccgcatgacgataatgttcatcctccatgcagtcattaatgtgctgatatccggcaagatagcccagatacgccaggaatgaatgactgccgttaagcatacgcagtttcatttcttcataaggcagcacatcgctaaccagttcagctcccgctttttcccattccggacgtccggcaacaaagttatcttctattacccactggcggaaaggttcacaggcaacgcctgccgcatcgcgcacaccggtaagttgttcgattttcgccagcgtatcctctgtcactgcgggcacaatacggtccaccattgttgatgggaaagtcacgttatcttcgatccattgtgccagttttacatcaatggcttgcgcataggaagtgacaacgtcacgcataacatgaccgttttctggcatgttgtcacatgacatgacggtaaatgcgggaagtcctgccgctttacggcgagccagcgcctcaacaatcacccctgttgcagttttcggctggtggggattttgcacgtcggcaacgaccatcgggtgatcaagcattaactgtccggtcgccggagagtggaaataccctttttcggtgattgtcagagagacaatcgcgatttgcggttcacacatcgcagccaacacggtttctaagccatctatttgtacgtgcaaggcttttttaacgacgccaacgacgcgagccgtccacgcatcagccgacatttccgcaacggtataaagattatcttgctgttgtaaatcggcaatttgctgttcgccgccgattaagttgacctcataatatccccagtcactgaaatgttccgtagcaagaatatcggcatacacgccctgatgcgcacggtgaaatgcaccaaagcctaaatgaacaattcttggggccaggttattacgatcataaacagggagcgtcgcttttgctgataacaaatgatttcccataacaattccttaaaattaaatatagcaagctacatgttttgttatatgaataaaaatcccctctccggtaagagaagggattgaggatttacagacttctggacggttgcgcagctcttacaacatgtggttgatcttctgcggcgtcttccagcgcacttaaatcacggtctttcacttctggcattttcagcgcagagattaaaccaatcacagaatatgccatgatcataatggcgatcggataccaggattccgtcatggtgcagaaaatccccgccaggataggaccaaaaccggaagcgataagaccaccaatttctttagaaatagccattcgggtaaagcggtttttacagccgaacatttctgccatggtaatgttttccagagcaaataatcccagcaccgcacagttatgaatcacaatcagtgcaaccataatggtgctcggggcatagcttttatctacgatgatagaaagcattggccacgccagcacaatcgcagaggtattcataataatatacgggatccggcgaccaattttatcggataaccaaccaaggaacggaatggtcataaagccgagaatcgaactgatcatcaatgcatctgttggaattgctttgttaaacaataacgtctgcactaaatagcctgcaaggaaagtctgaattaaacctgagttaccagcctgaccaaaacgcagccctgttgccagccagaaggatttgctctggaacatgctaccggtgcaggttttgctgtcggttggttgctgtcgttaaccttctcaaagaccgggctttctttcagattcatacgcaaccagatagcaaagaccatcacgacaacgctcgccaggaaaggtatacgccatccccacgccagcagttcctctttactgagaatgaagaacataaaggcccagattgccgttgcgctcaaggttccgcagttagttcccatagccacaaatgaggagataattccgcgcttaccttttggcgcatattccgccagcatcgtaccggcaccggaaatttccgcacctgcacccaacccctgaataatacgcagcgtcaccagcaagatgggggcaaaaacaccaatttgtgcataagtcggtaacacaccaattaaggtggtacagatccccatcatggtgatggtaataaagagcacttttttacgccctattctgtcgcccattttgccgaaaataaatgctccgacaatacgtgccacataacctgcaccataggttcccattgccagaattaacgccattgccgttgatgattcaggaaaaaatatttcatgaaacactaacgctgcgccgagcgaatataactggaagtccataaattcaagcgcagtgcccaaccatcccgatactgctgctttcaccaaatccttagtacttctttcgtgtttttctattgtcataatggttatctctaaaaaagaggtaagatgcgtactacttactcgccgttattggtattattcagaaaaagtgagtaagactttgcagcaatgtttttgatccagttcaaataaactaatggcatccgcaacatgctggaaatcaaatgtatgggtaattagtttttctggtttaattaaccctttacttaaccagtcgataacgaccgggaatttatttgcatttaagcgtgaagagaaaatagagagttcttttccggtaattccttgctgaatcacttcagacggttcactggagaagcccatcaatacaatacgtgccgctggagaagccagcgttacggcctctttcaagattgaaggatgacaagcggcatcgataattaaagtcggcttgatgcctttttcagcgaaactctcgccaagcggtgtctggctgttattaatcgcccagtctgccccgctctctttcgctttttccagtcgttcatcaatgcgatcggcaacaatcacatttttaacgttatagacgccttttaatacctgaacgatcgtcaggccgattgggccggcaccgtaaaccagaacggtatcattttcagtcggttgaccatgaccggtaacgttagccgcaatggtaaaaggttcgatcatcaccgcatattgatcggccacagcttcaggaattttccacgcattttttgccggaaccacagcatattcactgaaaccaccgtcagcgtgcacacctaatacagcaagtgtcgtacaaacgttcggcttacctatagagcacggatagcaatgcccacagctgaccaccggatcgacagcaacgcgttcaccgactctggcgctttccacgccttcacccactgcatcaatgacgccaaagaattcatgaccaatgacgcgcggatatttcgcaaaaggattatgcccacggtaaatatggctatctgaaccacaaattccggcaagtttcacttttactcgtacttcacccgctgacggggtgggtatttcacgttcgataatcgacagttgattcggtttttcaattaaaatgcttttcattaccttactccttaccagttccacagcgtgccatcttccagacgtgcgactggcagataagcaggttcatagggatatttcgccgccagcttttcatcgaattcgatgccaagacccggtttttctcccggatgcatatagccgttatcgaaagtccagttgtgcgggaagacttcgagcatttgttcggaataacccatgtattcctggacaccgaaattggggacccacagatcaaagtgcagcgccgcagccatgcagactggtgacaaatcggaaggaccgtgtgagccagtacgtacctgatacagcgaagcaaaatcggcaatccgacgcataccggtaattccgcctgcatgggtcagcgtggtgcggatataatcgatgagttgctcttcaatcagttgtttgcagtcccaaatgctgttgaagacttcacccaccgcgatgggtgtgacggtatgttggcgaatgagacggaagcattcctggttttccgcaggcgtcgggtcttccatccagaacatgcgataatcttcaatgctcttaccaaagcgcgccgcttcaataggcgttaagcgatggtgcatgtcatgcagcagatgttcatcaaaaccaaacttgttacgtaccgcgtcaaacaatttcggcatgaaatcgaggtatttctccgtcgaccacagctgctcttccggccactgtcctttggttgcgggttcataagccagacctttacctttcgacatgccgtaggtggttttcataccagggattccgcactgcacgcggatggctttgaatcccagctcctgatgacgggcataatcatccagagcttcatcaatactgtgaccggtggtatggcaataaaccatcaccccttcacgagacgcgccgccgagtaactggtaaagcggcatgttggcagctttggctttaatatcccacagcgccatatcaaccgctgaaatggccgacatcgtaaccggaccgcgacgccagtaagcacctttatagaaaaactgccagatatcttcgatacggtgtgcatcgcgaccaataagctgcggacaaaggtgatcctgcaaataagaggccacggaaagctcacgtccatttagggtggcatccccaaggcccgtaataccgtcctcagtggtgatttttaatgtgacgaaattacgccccggacaggtaacaaaaacttcagcctttacgatcttcatgttcgattccttgcatcgcttgtcgtgatgcatgaaatctacgcaactgagctactaccatacaagtatgaagatcaaaaaaagccggagtgatcacaaaaaaaggcgtatatttgcgccgtgaatggttgacaaaagatgaaacagaataccttttgtcagctgacacttcctcgtatcttattgataaaatggatttatgttcctacgtgcgcccccagcccgcaacaatgatcaacatgccgcaaagcgcaattaacgcccccgtccagtcataaagagtcagtttcacgccatccacaacgcgcagccaaatcaacgccgtgcagacataaacgccaccataagccgcgtaaacacgcccactcgccgcaggatgcaacgttaacaaccagacaaacagcgccagtgaaatccccgccggaagcaacagccagatactggcgtttcgcttcaaccacagccagggcaaaaagcatccaataatttcacacagcgcagtagcaaaaaatagtaacgttgttttaatcatctttgtcacttattgacatcacgtatagttatagggcgacataatatcatcaatataaacaccctccttgaacgttttgcgttcgcagtggatggtgtagaatcagctttaatcattcatacagggaatgaattatgaaaatcactctcagcaaacgaatcggcctgctcgcttttctgctgccttgcgcactggcattgagcacaactgttcatgccgaaactaacaaactggtgattgagtctggcgacagtgcacaaagccgccagcgcgccgctatggaaaaagagcaatggaatgacacgcgtaatctgcgccagaaagtgaataaacgcactgaaaaagagtgggataaagccgacgctgcttttgataaccgcgataaatgtgagcaaagcgccaacatcaatgcctactgggagccaaatactttgcgctgcctggaccgtcgaactggccgcgttattatcccctaacctgttattgatttaaggaatgtaaggacacgttatgccaagcgcccacagtgttaagctacgcccgctggagcgtgaagatttacgctatgtacatcaactcgacaataacgccagtgtgatgcgttactggtttgaggaaccctacgaagcctttgttgaactctctgatctgtatgataagcatattcacgatcagagcgaacggcgctttgtggtggaatgtgacggcgaaaaagccggtctggtggagctggtggaaattaaccatgttcatcgccgcgcagaatttcagataattatctccccggagtatcaggggaaaggtctggcaacccgtgccgccaaattagcaatggactatggcttcaccgttctcaatctctataagctgtatctgatcgttgataaagagaatgaaaaagcgattcacatttaccgcaagcttggctttacggttgaaggtgaattgatgcatgagttctttattaatggtcaatatcgtaatgccattcgcatgtgtatattccagcatcagtatctggctgagcacaaaacaccgggtcagactctcctgaagccgaccgcacaatagtattaataataatcgatcgtatttttgatggtgtaaacccgttcgacggcgggttttactccttcatcaacaatgattagctgacagtccaccggattggcgtgattgtcatattcacagctctgttttacatttccaacccgttgattattcagtaaagtaaccgctgtgtaatctaattttttgatcgggtccgttgatggcgtggcgctgacagataatgttttatcgttacttttcgtggttttacccagcggatacccctgatcatcatagcgatattccatctgcatctgtttgctgctggctttaatcacgaaaccattatcatcggtttcccaactcaccccggcagaaggtaattctgctagctggcattttccctgcaaacgaactcttttctccagcgtctcggcatcacggtaataattggcgtccagtaccagggcaaccacggtattattttccagatccagtaattcgagagaatcaaaacagccttcttccgacaaagtccccgaaacacgtttcgtcacttcaccttgctcatccattaatgtctgagtgaaatcttttacgggaccacgcagcggatcaaaatcgaattcattagagaaactggccatctccggggtaaatgaaagtgttacctctgtgcggtcacatcctgtgagtaatatcgcgagtaagcatggcagtaatttgtatttcacaacagtcacctgagagtagagatgattctcaatcatagtagcaaatacagtactttacacgttaaatgctatgcttaaagaagttatcttcgcgtaaggagcttatgatgaaactctcaacctgctgtgccgcgcttctgctcgccctcgcctcacccgcggtactcgccgcgccgggatcctgtgagcgcatacagagcgatatatcacagcgcattatcaataatggcgtacccgaaagcagcttcacgttaagtattgtacccaatgaccaggttgatcagcctgattcccaggtcgtcgggcattgcgctaatgatacgcataaaattctctacacccgtaccaccagcggtaacgtctctgctcccgcgcagtctacccaggataacgcgcctgctgaaccgcagtaacacattatcgactgaacgccggatacgacacatccggcgatttgaacatacaacataatcccaccttattactcatacccttctattgatatggattaataattattaaccccaaatgggtagactctctctattgttagcgcgctaaatattcaatatataaacatttatataacgataaagaacagggagtgagttatgtccaaaaatgaacaaatggtgggcatcagccgcagaacactcgttaaatctaccgcgataggttctctggcgctggctgcaggcggtttttctttgccgtttaccctgcgcagtgcagaagcagcggtacaacaggccaacgaaaaagtggtctggggtgcctgttccgtcaactgtggtagccgctgtgcacttcgtctgcatgttaaagataatgaagtgacctgggtggaaactgacaacaccggcagcgacgagtatggcaaccatcaggtacgcgcctgtttgcgcggtcgctccatccgtcggcgtattaatcatcccgatcgcctgaattacccaatgaaacgcgtgggcaaacgcggcgaaggcaaattcgaacggattagctgggatgaagccctggatactatcgccagtagcctgaaaaaaaccgtcaaacaatatggcaatgaggctgtatatattcagtactcttcggggattgttggcggcaatatgacccgctcttctccatcagcctcggcggtcaaacgcctgatgaactgctacggcggttcactaaatcagtatggctcctacagcactgcgcaaatttcctgtgccatgccctacacctacggcagtaatgatggcaacagcaccacggatattgaaaacagcaagctggtcgtgatgtttggtaacaacccggctgaaacccgcatgagcggcggtggcatcacttatcttcttgaaaaagcacgcgagaaatcgaacgcaaaaatgattgttatcgatccgcgatataccgatacggctgctggtcgtgaagatgaatggcttcctattcgcccgggcaccgatgccgcgctggttgcgggtattgcttgggtattgattaacgaaaatctcgttgatcaaccttttctcgataaatactgcgtcggctatgacgaaaaaaccttacccgcagatgcacccaaaaatggtcactataaagcctatattcttggtgaaggcgatgataaaacagcgaaaacgccgcagtgggcttcgcaaattacaggtatcccggtagaccgtatcatcaaactggcgcgtgaaattggcacagcaaaacccgcttatatctgccagggctgggggccgcaacgccaggcaaacggcgagctgacggcacgcgctattgctatgttgcctattttgacgggcaatgtcggcatcagcggcggaaatagtggtgcgcgtgaatcgacctacaccattaccatcgaacgcttgccggtgctggataatccggtcaaaacgtcaatctcctgcttcagctggacagatgctatcgatcatggcccgcaaatgacggcaatccgcgacggcgtccggggcaaagataaactagatgtgcccattaagttcatctggaactacgcgggaaataccctggttaatcagcattctgacatcaacaaaacgcatgaaattctgcaggacgaatcgaaatgcgaaatgattgtggtcatcgaaaactttatgacctcatcggcaaaatatgccgacattctgctgccagacctgatgaccgttgagcaggaagatattattcctaacgactacgccggtaacatgggatatctcattttcctccagcctgtcaccagcgaaaaattcgaacgcaaaccaatttactggatcctgagtgaagtcgcgaaacgtcttggacctgacgtctatcaaaagttcactgaaggtcgcacgcaggaacaatggttacaacatctgtacgccaaaatgcttgccaaagatccggcgttaccgtcttacgacgaattaaaaaaaatgggtatctataagcgtaaagatcccaatggtcattttgtcgcctacaaagcatttcgtgacgaccccgaggcaaatccacttaaaacgccttccggtaagattgaaatttattccagcaagctggcggaaattgcccgtacctgggaactggaaaaagatgaagtgataagcccactgccggtttatgcctcaacctttgaaggctgggactcccctgaacgtagtgccttcccactgcaactgtttggtttccattacaaatcccgtacgcactcgacctacggcaacattgatgtcctgaaggcagcctgccgtcaggaagtgtggatcaaccctattgacgcacagaaacgtgggattgccaacggcgatatggtgcgggtgtttaaccatcgtggcgaagttcggctaccagccaaagtgacaccacgcattctccctggggttagcgctatgggccagggagcctggcacgaggccaatatgtctggcgataaaatcgaccacggcggctgtgtgaatacgctaaccactctgcgcccttcaccactggcgaagggaaacccgcagcacactaatctggtcgagatcgaaaaaatataacccactacaaccataaattctggcatgacattttgtttgaaaagcaataagtgagtaatgatgaaaatccataccacagaggcgctcatgaaggctgaaatcagccgtagaagtctgatgaaaacctccgcacttggcagtctcgcgctggcaagcagtgctttcactttgccgttttcccaaatggtccgagcggcacaggcaccggtagaagagaaagcggtctggagttcctgcaccgttaactgcgggagccgctgtctgttacgtttgcatgtgaaagatgacaccgtgtactgggtggagtctgatacgacaggtgacgacgtctacggtaatcatcaggttcgagcgtgtttacgcgggcgctctatccgtcgacggatgaatcatcctgataggttgaaatatcccatgaagcgcgtcggcaagcgcggtgaaggtaaatttgaacggataagttgggatgaagccctggataccatcagtgataatcttcggcggatcctaaaagattacggcaatgaggctgtacatgtcctgtacggaacaggcgtagatggcggaaacatcaccaactcgaacgtcccgtaccgtctgatgaactcttgcggtggttttctcagtcgctatggtagctacagtaccgcacagatcagtgccgcgatgagttatatgttcggtgccaatgatggcaacagcccggatgatatcgccaatacgaaactggtcgttatgttcggaaataacccggcagaaacgcggatgagcggcggtggtgtcacttactacgtcgagcaagcccgcgaacgttcaaatgcacgcatgatcgtcatcgatccacgttataacgacacagctgccggacgtgaagatgaatggctgcccattcgccctggcaccgatggcgcactggcctgtgcgattgcctgggtactgattactgaaaacatggtcgatcagccatttctcgacaaatattgtgttggttacgatgagaaaacgctgcccgccaacgcaccacgtaacgcgcattataaagcctatattctgggcgaagggcctgacggcatagctaaaacgccggaatgggcagcaaaaatcaccagcataccggcagaaaaaattatccagttggcacgagagatcggttcagcaaaacctgcttatatttgtcagggttgggggccacaacgacactccaacggcgaacaaacgtcccgcgctattgccatgctttccgttctcaccggtaacgtcggcataaacggcggcaactcaggtgtacgcgaaggtagctgggatctgggggtagaatggttaccgatgctcgagaatcctgttaaaacgcagatttccgtctttacatggacagatgctatcgaccatggtacggaaatgaccgcgccccgtgatggtgttcgtggaaaagaaaaactggatgtccccatcaagtttttatggtgctacgccagtaacacattgatcaatcaacatggcgacatcaatcacacccatgaggtgcttcaggatgacagcaagtgcgagatgattgttggcattgaccacttcatgactgcctcggctaagtattgcgatatcctgttacccgacctgatgccaacagagcaagaagacctcatctctcatgagtctgccgggaatatgggctatgtgatcctcgcccaacccgcaacctcagcaaaatttgaacgcaaacccatctactggatgctgagtgaagtcgccaaacgcttaggaccagacgtttatcaaacctttactgaaggtcgcagtcagcatgaatggatcaaatatctccatgcgaaaacgaaggaacgtaaccctgagatgcccgactacgaggagatgaaaacgaccgggatctttaagaaaaaatgcccggaagaacactacgtcgctttccgcgcattccgtgtagatccacaggcaaacccattgaaaacaccttcgggaaaaatcgaaatttattctgaacgactggcgaagattgcggatacctgggaattgaaaaaagatgaaattattcatcctcttccagcttatacgccaggttttgatggctgggacgatcccctgcggaaaacttatccactgcagttaacgggcttccactacaaagcgcgtacccactccagttacggcaatattgatgtattacagcaggcctgcccacaagaggtgtggatcaaccccattgatgctcaggcacgcggtatccgtcatggcgataccgtgcgggtatttaacaataatggagaaatgctgattgccgcaaaagtgactccgcgtattctgcctggcgttaccgccatcgggcaaggtgcttggcttaaagcggatatgtttggtgaccgggtcgatcacggcggcagtatcaatattctgacctctcaccgcccttcaccgctggcaaagggaaacccgtcgcacagcaatcttgtccagatcgaaaaggtttaaggagtagcccatgaccacacaatatggattttttatcgattccagccgctgtactggctgtaaaacctgcgaactggcgtgcaaagattttaaagatcttggcccggaagtcagtttccgccgtatttatgaatatgctggcggcgactggcaggaagataatggcgtctggcaccagaacgtgttcgcttattatctctccatctcctgtaaccattgcgatgaccccgcatgtacaaaagtctgccccagcggtgcaatgcataagcgtgaagatggtttcgtggtggttgatgaagatgtttgtatcggctgccgctactgccacatggcttgtccgtacggcgcgccacagtacaatgctgaaaaagggcacatgacgaagtgcgatggttgttattcgcgcgtcgccgaggggaaacaacccatatgtgtcgaatcctgcccactgcgtgcacttgagttcggtccaattgaagaattgcgccagaagcacggcactctggctgccgtcgcgccactgccgcgcgcgcatttcacaaaacccaatatcgttatcaaacctaacgccaacagccgcccgaccggcgataccactggttatctggctaatccggaggaagtgtaaaatgggaaatggatggcatgaatggccactggttatctttaccgtattgggtcaatgcgtagtaggcgcgctgattgttagcggaattggctggttcgccgccaaaaataacgcagaccgtcagcacattattcgtggcatgtttttcctctggctgttgatgggcatcgggtttattgcctctgtcatgcacctgggatcgccactgcgggcgtttaactcgctgaatagaatcggagcttctggtctgagtaacgagattgctgccggttccatattttttgccgttggcggattatggtggctggtggcggtcatcggtaaaatgccgcaagcgttggggaaactctggttacttgtcagcatggcgctcggcatcattttcgtctggatgatgacctgcgtgtatcaaatcgacactgtgccaacctggcataacggttacactacgctggctttcttcctgacggtattgttgagcggtccaatacttgctgccacaattctacgtgcagcccgcgttacatttaataccacaccatttgccatcattagcattctggcgctgatcgcttgtgccgggttgattgtgctgcaaggtttgtctctggcgtctattcactcatccgtacaacaagccagcgcactggtaccagattacgcctccttacaggtctggcgtgtggtattgttatgcgcaggtctaggatgctggctttgtccgctcattcgtcgccgtgaacctcacgttgccggacttgttctggggttaatcctcattcttggcggtgagatgatcgggcgtgtgctcttttatggcctgcacatgacagtaggaatggctattgcaggttaacaaattggtgcggggcaacccgcacatttcaggatgttaggaatgacccatttttcacagcaagataatttttctgttgcggcgcgcgtgttgggcgcgctgttttattacgctccagagagtgcagaagccgcacctctggttgcggtactcacccgtgacggctgggaaactcagtggcctctaccagaagcgtcattagcgccgctggtgacggcttttcagacacagagtgaagagactcacgcccaggcctggcagcgtttgtttgtcggcccgtgggcactgccgtctccgccgtggggatcggtctggctggatcgcgaatctgtgctgtttggcgattcaacattggcacttcgtcagtggatgcgcgagaaaggcattcagttcgaaatgaagcaaaacgaaccggaagatcattttggttcactgctgctgatggctgcgtggttggcggagaatggtcgccagacagaatgcgaagaattgctggcatggcacctttttccgtggtcaacacgttttcttgacgtttttatcgaaaaagcagaacaccctttctaccgtgcactgggtgaactcgctcgcttaacgctggcgcaatggcaatcacaactgttgattcctgtcgcggttaaaccgctgtttcgataggatcaccgtattattgccggatggtgacgattacacgcaattcggcaattaataggttacagtgtcacgttttttatctcttaaagcacgcactgcttttgcggctggcctcttttgccgcaaaatagtcgcccgtgtttcattgcccatttctgctcatgcatcatctacacatctatccggatctgcgcactatgttccgccgtctgcttatcgcaacaatcgtcggtattcttgcggcctttgccgttgccgggtttcgtcatgcgatgctgctactggagtggctgttcctcaataatgactccggcagtctggtcaatgcagcgacaaatctttccccgtggcgacggctgctaaccccggcgctcggcggactggcggcgggtttgttgctgatgggctggcagaaatttacccagcaacgccctcatgcgccgaccgattacatggaagcgttgcaaaccgatggtcagtttgattacgcagcaagcctggttaaatcgcttgcctctctactggtagtaaccagcggcagtgcaattggtcgcgaaggtgcgatgattcttttagctgcccttgcagcctcgtgttttgcccaacgttttacgccacgccaggagtggaaattatggatcgcctgtggagctgcggcgggaatggctgcggcctatcgcgccccgcttgctggcagtttatttatagccgaagtgctgtttggcactatgatgttggcctctctcggcccggtgattatttccgccgtcgtggcgttgctgattagcaatcttattaatcatagcgacgcattactctacagcgtacaactctcagtgacggttcaggctcgtgactatgcgctgattatcagtacaggtgtgctggcaggtctgtgcggaccactgttgttaacgttaatgaacgcctgtcatcgtggatttgtgagtctcaagcttgcgccgccctggcaactggcactgggcgggttgatcgtgggtctgctttccctgttcacacctgcagtgtggggcaacggctatagcaccgtacaatcctttttaaccgctccgccactgttaatgatcattgccgggatcttcctctgtaaactgtgtgccgtgctggcgagtagtggttctggcgcgcccggtggtgtctttacaccgacgctatttatcggtcttgccattggcatgttgtatggtcgtagcctgggattatggttacctgatggcgaagaaattacgcttttactcggattgaccgggatggcgacactgttggcggcgaccacgcacgcgccgattatgtcgacgttgatgatatgtgaaatgaccggggagtatcagctactccccggtttattgattgcctgcgtaattgcgtcggtaatttcgcggacgttacaccgtgactctatctaccgccagcacactgcgaagcatagctaagcggatgtattgccccagttcacgctgttcggcgcgcggcagataaggcagttcaccaatgagcggtgccggaagttttttaccgagcacatcaatgatttccgcataatgcgccagtcctgggttgattcggttagccacccagccaatgagcggcagcccgtcgttggcaatcgcctgagctgttagcagtgcatggttaatgcaaccttcctgaataccgacaaccatcaacaccggcagttgttcctgcaccacccattcagagagcggacgcaaatcattcatcagactgcgccagccgccagtcccttctaccacgacatgatcgactttatcggtcaggtttgccaggccgtttgaaatgagggtgtaattgattgggcaactgtgcgccacgctactttcttcttcgcttaacgcgataggattaactgcttcataaggcagttcgatggttgaaacactctgcaacaccagggcatctttattacgcagcccttcgggtgtctctttgctccccttcgctacgggtttatatcccgcaaccgtttttccctgggaggctaacgcttgtagcaatgcgcgggaaaccaccgttttccctacagaagtgtctgtaccggtaataaagaaacgcttcagcatcactaactccaccgttatgcttcacaaatataaaccaggaaaataattaaccttgaaagtctaagttatgctttcctggcccaaattgagatagcgcaaattttggtagaacagttaaaaaatgttaaccctgcaacagacgaatcaacaaagaaccgttatacatcgcgtcttttaccagcgcagcgcctgccatcgtgccctggttagaaaactgagtactctcaacgctaatgtgctgactatacgcaggaagggcctgctgacggatgctgtccgagatgactgggaagaggatatctgccgctttacttaacggtgagccaatcagtattttttgtgggttaaataaattcaccatgatggcaagaatgcgaccgacatgcgcgcctaccccggtaatgatgtcttttgccagtagatcgccgcgcaatgccgcctgacacaatgagtccacggttaacggttgtccatgtaacatcgagctcatggattgattgagacgcagctgtgccagctcaagaatactgtccacactggcgatggtttcgaggcaaccgtgattcccgcaataacagcgtttcccatacgggtcgacctgtgtgtggcctatttccacgaggctactgctgcctgcgtgtagcagatgaccatcggtaatgacgccagcccccacgttgtgatcgataaccacctgaatcacatcgcgcgccccgcgtgaggcaccaaacaaggcctcagccatcgtccatgcgctgatatcatgctgaatataaaccggtacgccggtatgctgctccagcgcctcgccgagcggcatctcttttacatcctcgtagaacggcatgcgatgtacaataccattttccgtatcaataattcccggcaaggttatggcaatcgaagtcagacgctcaagttttttctggtggcggataaaaaactgatcgatatgggaaatgatacgctccagcaatggcgagtcatcttttaacgccagttcctgcgactcttccactaccagtttgctgctcagatcgcgcaaagcaaggaaaatctccccgcgactaatgcgcagagaaagatagtgccaggcttcagtttcaaccaccagccccactgccggacggccacggttccccgcttctttgatttccagctcttgcaccaggtgtgcttcgagcatctcacggacaattttagtgatactggcaggagccagttgcgccagacgggaaagatcgatacgcgagactggaccaagctgatcaatcaggcgataaaccgcgcccgcgttggtctgctttatttgatcaatgtgcccaggctgattttcagcaaccaccgcatactccctatattttcgcgctccgaaataatctgtaggctatggtgaagcacttcaatacgtgtcgtcaaatttttacttaggcatgtgattaacagcacatttttcgggctttttcgctgaaatttccctcacctgagagcattcagcagatgaatacgaaagttacgcgcagccggactttgttcatgatgtttcggccagaccaaccacatttcagaaaccgcatcctcttcagcaatcggcacccagcgcatttcgttgagctgaacacgtttaaatgacgcaggcaaaattgaaacacccagaccagcggaaaccagaccgatgatggtcattgcctcacccacctcctgagtgatgacgggcgtcaaattgtaacgtctcatcagcccgagaatatcgtcatacagccctgttccgacgtgcggatcaaaaaagacaaagggttctttcgccagttcagccagcgttacactcgggttatttgccaggggatgatcgtgcgggatcatcgccataagcggttcatggacgatgactgcgtgttcaagcgtctccggtaacgctgtgttacgcagcaatcccatatccagcgttccttcaatgagcggagcgatttgctcgcgagtgttcatttcgcgggtttgtaaatggacatcgggataatcacggcgaaacagcgataacgtatcggacaccgcccgaataaaaggagcggacgaagtaaaaccaatgcgcaactcccccgcttcgccctgatgcagcctttcagcgcgagcggcagcatcatccaccatagacaggatttgccgactatctacaagaaactgttttcctgcttccgtcagcaatacactgcgattggtccgtgccagcagtcgggcaccaatttgttgctccagcgcctgaatctgctgacttagcggtggttgcgaaatattcaggcgggcagcggcacgcccgaaatgcagctcttctgcaacagcgacaaagtaacgcagatgacgaagttcaagattcatatttaaaacatcttatttgagattattaatatattagacagaacaattcgattttcctaatctattcataagcctgatccacaggcatatttagcaaggatttcaagtgagccgtactacaactgttgatggcgctccggcaagcgacactgacaagcaaagcatttctcagtcaaatcaatttattaaacgcggtacgccgcaatttatgcgcgtcaccctggcgcttttctctgccggactggcaactttcgcacttctctattgtgtgcaacctatccttccggtgctttcacaagagtttggcttaacgcccgcgaacagtagtatttcactgtccatttcaacggcgatgttggctatcggtttgctgtttactggcccgctatccgatgccattggtcgcaaaccagtgatggtcacggcgctactgttggcctccatttgtacgttactttcgacaatgatgaccagctggcacggcattttgattatgcgcgccttgattgggctttcgttaagtggcgtggcagccgttggcatgacttatcttagcgaggaaatccaccccagtttcgtggccttttcaatggggttgtatatcagcggcaactcaattggcggcatgagcggacgcttaattagcggtgtcttcacggacttttttaactggcgaattgcgctggcggcaatcggttgtttcgcgttggcctcggcgttgatgttctggaaaatcctccctgaatcacgccattttcgcccgacttcgctgcgccctaagacgttattcatcaactttcgtctgcactggcgtgaccggggattaccgttattgttcgcagaaggctttttgctgatggggtcgttcgtcacgctgtttaattacatcggctataggttgatgctttccccctggcatgtcagtcaggccgtggttggcttattatcgctggcttatttgaccggtacatggagctcacccaaagccggaaccatgaccacccgctatggacgcggtccggtgatgttgttttcgacgggggttatgctgtttggtttactgatgaccttattcagctcgctgtggctgatctttgccggaatgttactcttctcagccggattcttcgcagcccactccgttgccagcagctggatcggcccccgcgcaaaacgcgctaaaggccaggcctcctcgctgtatctgttcagttactatctggggtcgagtattgccgggacgctgggtggtgttttctggcataactatggctggaacggcgtcggcgcatttattgctctgatgctggtcattgctctgctggtcgggacgcgtttgcatcatcgtctgcacgcctgaaaaaataagtccggactgaggtaaatacccgtccggacttattgcctgctcaaaccaacgttaatagccatcctaaaaagccaattcccgcagcgcatctagcgtcatcaggattataagtacccaaataaacggattcattttgctgtgtgtcatttattactgatgcgcagttattctaccgctttgtaagtagtaaaatagttaacacgatcaagactactattattggtagctaaattttccttaagtcacaatacgttattatcaacgctgtaatttattcagcgtttgtacatatcgttacacgctgaaaccaaccactcacggaagtctgccattcccagggatatagttatttcaacggccccgcagtggggttaaatgaaaaaacaaattgagggtatgacaatgaaaaaagtattagctctggttgttgccgctgctatgggtctgtcttctgctgcctttgctgcagagactgcgaccacacctgctccgactgcgacgaccaccaaagcagcgcctgcgaaaaccacacatcataaaaaacagcataaagcagcacctgcccagaaagcgcaggcggctaaaaagcatcataaaaatgccaaagctgaacagaaagctcctgaacaaaaagcgcaggcagcgaagaaacacgccaagaaacacagccatcagcaaccggcaaaacctgctgcacaacccgcagcgtaagttttcaacagtaatgctggcgcgccccctcgcgcctgaaaattacggtgctaagcgggtaacgtttagcaccgcctttagcggagggtagtatggtgggccgttatcgctttgagttcattcttatcatccttattttatgcgcactgattgccgcccgtttttatctttcctgatcgtagttatctgattttactcccactttcatcccgtcccgtctatagtatttatgagggtttgcttttaataatcataattacccaccagagtgtgatatgcgtacaaccattgctgtagtgttgggtgcaattagtttgacgtctgcttttgtgtttgcagataaaccagacgttgccaaatcggcaaacgatgaggtcagcaccctgttttttggtcatgatgatcgtgtgccagtgaatgacacgacccaatcaccgtgggatgcggttggccaactggaaacggccagcggcaatttatgtacggcgacgctgattgcacccaatctggcattaacggcaggacactgtttattgacgccgccaaagggtaaagccgataaagcggtagcgctgcgtttcgtgtcaaataaaggtctttggcgctatgagatccacgacatagaaggccgcgttgatccgacactgggaaagcggttaaaagcagatggggatggctggattgtacctcccgcagctgcgccctgggacttcggtttgattgtgctacgtaatcccccttctggcattacaccgttgccgttatttgagggagataaagccgcgcttaccgccgcattaaaagcggctggtcgtaaagtgactcaggcgggctaccctgaagatcatctcgatacgttgtacagtcatcaaaactgtgaagtgactggctgggcgcaaacgtcggtgatgtcgcatcagtgcgataccttgccgggtgacagcggttcgcctctgatgttgcataccgatgacggctggcaattaattggggtgcaaagctcggctcctgccgcgaaagatcgctggcgcgccgataaccgggccatttctgttaccggttttcgcgacaagctggatcaactgtcgcaaaaataatgttcaaacgctgcccgacagcgcgggcagcgtgttcatcaggcaagtttcaccatgatcattccagccaacagcaagaccaggccaatccagcctttacgatttaaccgttgaccaaacaagatccaacctgcggctaacgtggcggcaataccaaacccgccccacaatgcataagcgacagacaagtcgatccctttaacggcctgagaaagcgcactaaaggcagccagcaccgccgccagagagagcaagccaaatattttgcgacgaaagccgtcagaaaatttcaaaaagacgttagcaatgatttccagcacgattgccaatgccagccaggcggcgtgaacccattcaaactgcgccatggttcacctccagttcaggtttacgcgctttacgggtacctgatttgatcaatacaatcccggcgaccagggtggttaacccggcaattttcatcagcgatagactttcgtcgaataacaaaacgctaaacaaggtaataaataaaataccgataccttcccacagcgcataagccacgcctaaggcgatctttttaacggcgaaagagagaaatatatacgacagagaaatcatcaccagcattaaaataaagccgccatttccctcactgacgctcgcccatttcatagacagcgtaccggtaatttctgtagcaacagccagacctaataaaatccaataaatatacattgtccttctcctgcaagagaattattttaattttcgcttaattcagcgaaaccaaagtaaagtggtcaagccccgcgcatagcgcaagcttaagcagaagaaaggactaaagcgcgttgcgccagtgctgctcacctacgagcaagatagtggatgaggtacgaagatgggtaaatgtagaaaataacgtcctgaacaaattgtccataatattacaattatccgcagtgttgcttctcgtcatcgcggatgataattgtcctcggtagttgaacacgcctgatttgtatcatagcttaagaattaactcaaaatattttcacttctttacctgcgcggtttgattttcgttatgatgacggagcgaaaaagacattattattagccaaggaagaaaaaacggggacaagcatggcaaagccgatcatcacgctcaatggcctaaaaatcgtcattatgttgggaatgctggtcattattctctgcggtatccgttttgccgccgagatcatcgtgccgtttattctcgcattatttattgctgttattcttaacccgctggtgcaacacatggtccgctggcgagtgccgcgtgtactggcagtgtcgattttgatgaccatcatcgtgatggcgatggtgttgctattagcttatctgggttccgcgctcaacgagttgacgcggacgttaccgcaatatcgcaactctattatgacgccgctgcaagcgattgaaccgttgttgcaacgcgtagggattgatgtctcagttgaccaactggcgcattacattgatccgaacgcggcgatgacgttgctcaccaacttattgacgcagttatctaatgccatgtcatcaatctttttattgctgctgacggtgctgtttatgctgctcgaagtgccacaattgcccggaaaatttcagcaaatgatggcgcgtccggttgaagggatggcggcgattcagcgtgcgattgacagtgtgtctcattatctggtgctgaaaacagccatcagcatcatcaccggcctggtcgcctgggcgatgctcgccgcactcgatgttcgcttcgcttttgtctggggattgctggcctttgcgcttaattacatcccgaatattggttcagttctcgcggcaatcccccctatcgctcaggtactggtgtttaatggcttctacgaagcgttgctggtgctggcgggatatctgctgattaatctggtcttcggcaatattctggagccgcgcatcatgggacgtgggctggggctttccacattggtggtatttttgtcgttgattttttggggatggttgttaggaccggtgggtatgctgctttccgtgccgttgacaattattgtcaaaattgcgcttgaacaaacagcgggaggtcaaagcatcgccgttctgttaagcgatctcaataaagagtgacggcctccgcagaggccgtcagggttacagagccttcaggattgcatccacgctggctttggcgtcaccaaacagcatgtgggtgttttccttgaagaacagcgggttttgcacaccagcatagccagtgttcatcgaacgtttaaagacaatcacgttctgcgctttccacacttccagcacaggcataccagcaatcggactcttcggatcatcctgcgccgccggattaaccgtgtcgttagcaccaatcaccagtacggtatcggtatcagcaaagtcatcgttgatctcgtccatttccagcacgatgtcatacggtacttttgcttcagccagcaatacgttcatatgtccaggcaaacgccccgcaaccgggtggataccgaaacgcacattaataccacgagcgcgcaatttctcagtaatttcagcgacaggatattgcgcctgcgcaactgccatgccgtaccccggagtaatgatcactgaatgggagtttttcagcagttccgctgtctcttctgcagtgatttcgcggtgctcgcccacttcctgatcatcaccagtagaagagccgtcggtgccgaaaccacccgcaataacgctgataaaggaacggttcatcgccttacacataatgtaagaaaggatagcccccgaagaaccgaccagcgcaccggtcacaatcagcaggtcgttgctgagcataaagcccgcagccgcagccgcccagccggagtacgagttcagcatcgacaccaccactggcatatctgcaccaccgatggaggcgactaaatgccagccgaataccagcgcaatggcggtcattatcagcaatgccagcacttgcaggccgacgctgtccgtgcgaacaaatacaatcagcagcaggaaggaaacgaccagagccgccaggttcattttgtgacggtttggcagcatcaacggtttagacgaaatcttgccacacagtttgccgaacgccaccaccgaacccgtgaacgttaccgccccgatgaagataccgaggaacacttccgtcaggtgaatattgaccagaatcggtgccattcccgcgtcatgatgcagatagctgttaaaaccaaccagcactgccgccagacccacgaagctatgcaggatcgccaccagttctggcatttcggtcatttcaactttcttcgccagacggataccaattgccccaccaatgaccatagccagcaagatccagccaacattacccgtatccggtccaaaaatggttgcgattaacgcaatcgccatcccggcgataccgaagttgttaccctggcgagacgtttcatgtttcgaaagaccggccagactgaagataaacaggatcgcggcaacaatgtatgcagctgtaactaatcctccagacatatgttaccccttaatttttgcggaacattttcagcatgcgctgagtcacggtgaagccaccgaaaatattaatgctggctataagcaccgcgataaaactaaggaagctaacccagccgccctggccaatctgcaacagtgctccgacaacaataatccctgaaatcgcgttggtgaccgacatcaacggtgtatgcagcgcgtgcgatacattccacaccacgtaataaccgacaacgcaggccagcgcgaacacagtgaagtgtccaaggaactcttttggcgcaacgcttgccatccagccgaaaaggatgattgccaacgccatcaacgcgtatttacgccacggtgagcaggcacatttttcctcagttttcacttccggtgccgctttttgtgccgcctgcggctgagctgatacctgaatcggcggtgccggccaggtaatttcgcccgcacggatcacagtcacgccacgaatcaccacatcatcaaaatccacagtgatgttgccgtctttctctttgcacaacagtttcagcagattaacgaggttagtgccgtaaagctgtgaggattgcgtcggcagacggcccggaagatcggtgtaaccaattactttgacaccattttccgtagtgaagatttcacccggcacggtgtattcacagttgccgccgttttgggctgccaggtcgacaatcacactgcccgccttcatggagtcaaccatttcacgggtaattagcttcggcgctggtttgcctggaataagcgcggtggtgacaatgatatcgacctcttttgcctgggcggcaaagagttccatttccgctttgatgaacgcgtccgacatcactttggcatagccatcgccgctgcccgcttcctctttaaaatccagctcgaggaattctgcgcccatactttgaacttgttctttcacttccgggcgggtgtcgaatgcacgcacaatcgcgccgagactgtttgctgcgccaatggcggccagacctgcgacaccggcaccaatcaccatcacttttgccggtggcactttcccggccgcagtgatttgtccggtaaagaagcgcccaaattcatgtgccgcttcaacaatggcgcgataaccggcgatattcgccatcgagcttagtgcgtccagcgattgtgcgcgtgagatacgcggcacagagtccatcgccatcacggtcacgttacgttccgcaagtttttgcattaattccggattctgcgcaggccagataaaactcaccagcgttgtcccaggattcagtaacgcaatttcatcatctaacggcgcattgaccttcagaatgatctctgactgccagacgctattcccttctacaatttcagcgcccgcttgcacaaacgctttatcgtcaaaacttgccagttgacccgcgccgctctctaccgcgacggtaaaacccagtttcagcagctgttccactgtttttggcgttgctgcaacacgggtttcattggttaaccgttctcttggtatgccaattcgcatgatattcccttccatcggttttattgatgatggtttgcttgtgtcaggagccacacaagccgctcatgtacgagctaaatgttactccgttaaaataaattagtaacaaacgccctataacgtactgaaaattatgcctgtgatctagcgccaaaaatcagtatttcggcgtgaactcgcaaaatattaacgattcagccgtgatagtgggataaacaccttagaacgccggataaagactgataattgtcttcggcggccgggtaaaacgagacatcgccccggcacaaatcactacttaacattaaattaacttatacaattcagttgcttcagtagtattgatggtgatacggctgttttttaagcatagacggtcatttgagcagaattaaaattggtttaaggaatgtgatatgaaaaatgacgcagacagttacaccgtttaaatgcaataatcagccacgtttctcgttaataacaataccagtacctggtttgcgcaaggcgaaggattatttttatgaagcttaagaacaccctcctggcgtcggcactgctttctgctacggcattctccgttaacgcagcaacagaactgacaccggagcaagcggcagcggttaaaccttttgaccgtgtagtgattaccggtcgttttaatgctattggcgaagcggtgaaagccgtttctcgtcgcgcagataaagaaggtgccgcctctttttatgttgtcgacacttctgattttggtaacagcggtaactggcgtgtggtcgctgacctctataaagccgatgctgaaaaagcagaagaaacaagtaatcgcgtaattaacggtgttgtcgaactgccgaaagatcaggctgttctgattgaaccgtttgacacggtcaccgtccagggcttctatcgtagccagccagaagtcaatgatgccatcaccaaagcagcaaaagcgaaaggtgcctactctttctacatcgttcgtcaaatcgatgccaaccagggcggcaaccagcgtattactgcattcatctataaaaaagatgctaagaaacgtatcgtccagagcccggatgtcatcccggcagattccgaagcaggacgtgcagctctggctgccggtggcgaagctgcgaagaaagttgagatcccgggtgttgcgactaccgcatcaccaagttctgaagtcggtcgcttctttgaaacccagtcatcaaaaggcgggcgttacaccgtcacgctcccggatggcactaaagtcgaagaactgaacaaagcgacagcagcgatgatggtcccgttcgacagcatcaaattctctggcaactacggcaacatgaccgaagtctcctatcaggttgcgaaacgtgccgcgaagaaaggtgctaagtattaccacatcacccgccagtggcaggaacgtggtaataacctgaccgtcagcgcagatctgtataaataactattcagttactcctataaggcggcttgatgccgcctttcgcatttttagtcataaatttccctgcgaccattgcatgcagacacatctcttcgtaaaatcccgcgcttcagtggcaaactccatttttatgcgttttgccctaatatttattcttcttgtcacgttttaatcactggatatcgatggaaaagaaactgggactgagcgcactcaccgcgctggtattaagctcaatgctgggcgcgggtgttttcagtctgccgcaaaatatggcggcagttgccagcccggcagcactgctcatcggctggggtattactggcgctggcattttattgctggcctttgccatgctgatcctcacgcgcattcgccccgaacttgacggcggtatctttacctatgcccgcgaagggtttggcgagctaatcggcttttgttccgcatggggatactggctgtgcgcggtcatcgccaacgtctcctatctggtgatcgttttttccgcgttaagcttttttacggacacgccggaattgcgcctgtttggcgatggtaatacctggcaatcgatcgtcggtgcatcggctttattgtggattgttcactttttgatcctgcgcggggtgcaaaccgctgccagcattaaccttgtggcgacactggcaaaattgttgccgttgggtctgtttgttgtgctggcgatgatgatgttcaaactggataccttcaagctcgacttcaccggacttgcacttggcgtacccgtgtgggaacaggtgaaaaacaccatgctgatcaccctgtgggttttcattggtgtggaaggtgccgtggttgtttctgcgcgtgcgcgtaataagcgtgatgttggcaaagcgacactgctggcggttctctccgctctgggcgtttatttgctggtaacgctgctttcgctgggcgtggtggcacgtcctgaactggctgaaattcggaacccgtcaatggccggtctgatggtggaaatgatgggaccgtggggcgaaatcatcatcgctgccggtttgatcgtttccgtttgcggcgcgtacttaagctggaccatcatggcagcagaagttccgttccttgcagccactcataaagcattcccgcgcatttttgcacgccagaacgcacaagctgcgccatccgcttcactgtggctgaccaacatctgcgtgcaaatttgtctggtgctcatctggctgaccggttccgattacaacacattgctgaccatcgcctcagaaatgattctggtgccctatttcctggtcggcgcgttcttgctgaaaatcgcaacccgtccactgcataaagcggtaggtgtcggtgcctgcatttatggcttatggttattgtacgcctctggtccaatgcacttgctgttatccgttgttctgtatgcaccggggctgctggttttcctgtacgcgcgtaaaacgcatacccatgataatgtactgaatcgtcaggaaatggtgctgattggcatgctgttaattgcctcagttccggcgacctggatgctggtgggataacgttcatcccatcgttggatagcaaaggagataacgatgggtaaaacccagtccttgccaatattaattactggcggaggtcgccgcatcggcctcgccctcgcatggcatttcattaatcaaaagcaaccggtgattgtcagctatcggacgcactatcccgccattgatggactgattaaggcaggtgcgcagtgtattcaggctgatttttcgaccaacgacggtgtgatggcgtttgccgatgaagtactaaaaagcacccatggtctgcgtgctattttgcataacgccagcgcgtggatggcggaaaaaccgggagcgccactgaccgacgtactggcttgcatgatgcagatccacgttaataccccatacctgctcaaccatgctctggaaagattactgcgtgggcacggacacgccgccagcgatatcattcactttaccgattatgtggtggagcgcggtagcgacaaacatattgcgtatgctgcaagcaaagcggcactggataatatgacccgctcgtttgcccgcaagctggcaccggaagtgaaagtgaattctattgcgccatcgctgatcctgtttaatgaacatgatgatgctgaatatcgacaacaggcgctgaataaatcactgatgaaaaccgcgcctggcgagaaagaagtgatcgacctggtcgattacttacttaccagctgctttgtcaccggacgcagtctcccacttgatggcggtcgtcatctgcgttaatgcagcttaatccagcatataatcaacacccatgcgcttattccccagcacgcaacagagccaacaaaagcagcgggcaagcgcatcattccggtgaaataccatagggacgccaggtaaacaaaatagggaataatcgaccacatactaaaaatgatggttgcgcgtaaggcttcaatgccgcgttcgctggcaacaatataatgcgcgataagcgcaaaggtcgggaaaagtggaatcagcccggcgatataataatttttcgtttttgctaaaacaccaatcaacagcactaccagcgcaccgagcgcggctttgattaccagccccatctttttaccttaacactttcataacaagtcatcagtagaatacctgatgaaaccttgtttagaaacgattgatagtaagtaaaaacagtgcggtgtattgtgacgtttttatatctaccgtgaatgttatgaacactatcgtatttgtggaagatgatgcggaagtcggtgcactgattgccgcatacctggcaaaacatgatatgcaggttaccgtagagccgcgcggcgaccgggccgaagaaactattctgcgagaaaatccggatttggtgttactcgacatcatgctaccaggcaaggacggcatgaccatttgtcgtgatttacgcgcaaagtggtccggaccgattgttcttctaacctctctcgatagcgatatgaaccacatcctggcactggaaatgggtgcctgcgactatattctcaaaacgacgccccctgctgttttgctagcgcgtttacgtttgcatttgcgtcagaatgagcaagccacagtgaccaaaggtattcaggaaacgtctctgactccctacaaagccctgcatttcggcacgttgaccatcgatcccatcaaccgcgtagtcaccctggctaacactgaaatctcgctctcgacagctgatttcgaattattgtgggaattagctacccatgccgggcaaatcatggaccgcgatgcattgctgaaaaatttacgcggcgtcagttatgacggactggatcgtagcgtggacgtggctatttcgcggttaagaaaaaaactgctcgataacgccgcagaaccttatcgtattaaaaccgtgcgtaacaaaggctatctttttgcgcctcatgcgtgggaataagcgatgaaaaaactgtttatccagttttacctgttattgtttgtctgcttccttgtgatgtctctgctggtcgggctggtgtacaaatttaccgccgaacgcgcaggcaaacagtcgctggatgatttgatgaacagttcgctgtatctgatgcgcagcgaattgcgtgagatccccccacacgactggggtaagacgctgaaagagatggatttaaatctctctttcgatctgcgtgtcgagccactgagtaaataccatcttgatgatatttccatgcaccggctgcgtggcggcgaaattgtcgctctggacgatcagtacacttttttgcaacgtatcccgcgcagccactacgtgctggcagttggtcctgttccttatctttattacctccatcagatgcgattgctggatatcgccctgatcgcttttattgccatttccctcgcctttccggtgtttatctggatgcgtccgcactggcaggatatgttaaaactggaagcagcggcgcaacgatttggcgatgggcatctcagtgagcgtatccactttgatgaaggttcgagctttgaacgacttggcgtcgcatttaaccagatggcggacaatatcaacgccttgattgccagcaaaaaacagcttattgacggtatcgctcacgaactgcgaacaccgttagtgcgcctgcgttatcgactggagatgagcgataacctgagcgccgccgaatcccaggcgttgaatcgcgatatcagtcaacttgaagctttaatcgaagagctgctgacttatgcccgactcgaccgcccacaaaatgagcttcatcttagcgaaccagacctgccgttgtggctgtcaacgcatctggcagatattcaggcagtaacgcccgataaaacggtacggataaaaacgctcgcgcaaggccattatgcggcgttggatatgcgcttaatggagcgcgtgctggataatttgctcaataacgccctgcgctactgtcactcaacggttgaaaccagcctgctactgtcggggaatagagcgacattaattgttgaggatgatggcccagggattgccccagaaaaccgcgaacatatctttgaaccttttgttcgcctcgatcccagccgggatcgctcaaccggcggctgcgggctggggctggcaattgtccactctatagcactggcaatgggcggtacggttaattgtgacaccagcgaactgggtggtgcccgcttctcgttcagctggccgttatggcataacatcccgcaatttacctctgcctgacactatgcgcacggtggtcaagtcaccaccactgtgctataaaataaggatgttgtaactaaagtggttaatattatggcgcgttacgatctcgtagaccgactcaacactacttttcgccagatggaacaagagctggctgcatttgccgctgagctagaacagcacaaattgctggttgcccgcgtgttctctttgccggaggtaaaaaaagaggatgagcataatccgcttaatcgtattgaggtaaaacaacatctcggcaacgacgcgcaatcgctggcgttgcgtcattttcgccatttatttattcaacaacagtccgaaaatcgcagcagcaaggccgctgtccgtctgcctggcgtgttgtgttaccaggtcgataacttttcgcaagcagcgttagtcagtcatattcagcacatcaataaactcaagaccacgttcgagcatatcgtcacggttgaatcagaactcccctccgcggcacgttttgaatgggtgcatcgtcatttgccggggctgattacacttaatgcttaccgcacgctcaccgttctgcacgaccccgccactttacgttttggctgggctaataaacatatcattaaaaatttgcatcgtgatgaagtcctggcacagctggaaaaaagcctgaaatcaccacgcagtgtcgcaccgtggacgcgcgaggagtggcaaagaaaactggagcgagaatatcaggatatcgctgccctgccacagaacgcgaagttaaaaatcaaacgtccggtgaaggtgcagccgattgcccgcgtctggtacaaaggagatcaaaaacaagtacaacacgcctgccctacgccgctgattgcactgattaatcgggataatggcgcgggcgtgccagacgttggtgagttgttaaattacgatgccgacaatgtgcagcaccgttataaaccacaggcgcagccgcttcgtttaatcattccacggctgcacctgtatgttgcagattaacccccggctttcatactgccgaccatctgttctggccgtacccagcggtcaaactcggcttcgctaagataccccagcgcaagggccgccgcttttaaggtcagcccttctttatgcgcttttttggcgatctcggcggctttgtcataaccaatgtgggtgttaagcgcagtcaccagcatcagcgattcattgagtaattgattgattcgctcacgattcggttcaatgcccactgcacagtgtttgttgaaactttccatgccatctgccagcaagcgcaccgattgcaggaaattatggatcaccatcggacggaagacgttcagttcaaagttaccggaagcgccacccatgttgatcgccacgtcgttccccatcacctgacagcagagcatggttaatgcttcgcactgtgttgggttcactttccctggcatgattgagctgcccggctcattttccgggattgagatttcaccaattccgcagcgcgggccagaggccagccagcggacatcattggcaattttcatcagtgacgcagccaaccctttcaatgcgccgtgcgcctgaaccagggcatcacaggtcgccagcgcttcaaatttgttcggcgcggtaacaaacggtgcacaggtaatgactgccagttcatctgctacgcgacgcgcatattccggatgggtatttagtccagtacccaccgctgtaccgcccagagccagttccgctacgtgaggcaggctgtattcgatatgtttgagattatgctccagcatcgctacccagccggaaatctcctgccccagcgttaacggcgtggcgtcctgcaagtgggtacgaccgattttgacgatatcggcaaatgcgcgggatttttcactcagcgtctgggtcagggttttaagttgtggaatgagttgcttgcgcagcgccagcagcgccgcaacgtgcatcgccgtcggaaagacatcgttggaactttggcttttgttcacgtcgtcgttagggtgaactttacgttccatcccgcgcacgccgccgagtaattcactggcccggttagccagcacttcgttcatgttcatgttactttgcgtgccggagccggtctgccagatagccaacgggaattcgtcgtcatgctgtcctgccagtacttcatccgccgcctgccgaatggcgctcgctttctcttcagacaacaagcctaaatcttcattaacttttgccgctgcgcgcttggttagcgccagcgcatgaatcagtgaggtgggcattttctccgtcgaaatgcggaaatgctccagcgagcgttgagtttgtgcgccccacagcttatctgccgggacatcaatcgcccccatcgaatctttttcgctgcgtactgtattcatggcctgctcctcacctgattaattttttctttctgttttgctttcgttaagcaacttttagcttactcattatttaccatttgataacaaatgtttggtctttcgtgccatgtaaaaaaaccgccccgaagggcggctctgtttatttcacacagcgggtgcattgtgtgagttgtatctgctggaagaagtcatttcctttatcatccacaaggataaacgccgggaaatcttccacttcaattttccagatggcttccattcccagttccggatattcaacacattccaggctcttaatacttccctgcgccaatacagctgccggaccaccgatactgccgaggtagaagccgccgtgttttttacaggcatccgtcacctgctggctgcggttgcctttcgccagcatgatcatacttccgccctgcgcttgcagttgatcgacataagaatccatccgtccggcggtcgttgggccaagagaaccggaggcataaccttccggcgttttggccggacccgcgtagtaaatcggatgatctttaatgtactgcggcagcccttcaccgttatccatccgctctttcagtttggcgtgagcaatatcacgaccgacgataatcgtgccgttaagcgataagcgtgtagaaacgggatactgcgacaactgtgcgaggatctctttcatcggacggttaaggtcaacgcgcaccgcttcgccttctcctgctttgcgcagctcttccgggatatatttgcctggattatgttccagtttttcgatccagatcccctgacggttgatcttcgctttgatattacggtcagcagaacaggagacgcccataccgaccgggcaggatgcgccgtgacgtggcaggcgaatcacgcggatgtcatgagcgaagtatttaccaccaaactgcgcacccagaccaagattttgcgcttcgatcagcaattctttttccagttccacatcgcggaacgcctgaccgtgctcattcccttccgttggcagttcatcatagtatttagcggaagcgagtttcaccgttttaagattcgtttctgcagaagttccaccaataacgaacgcaatatgatacggaggacaggccgccgtacccagcgtgcgcatcttctcaaccaggtaatttttcagttttcccggcgtcagtaacgctttggtttcctgatagagatacgtcttgtttgccgaaccgccacctttggcgatacagaggaatttgtactcgtcgccatcaacggcataaagatcgatctgcgctggcaagttggtgccggtattcacctctttatacatatccagcggcgcgttttgcgagtagcgcagattatcctcgatataagtgttatagacaccgcgcgccagcgccgcttcatcaccgccaccggtccatacacgctgcccttttttaccaacaataatcgcggtgccggtatcctgacaggttggcagaacgccttttgccgcgatgtcggagttacgcaggaattgcagcgccacatatttatcattttcgctggcctccgggtcacgcagaatgtcggccacctgttgttggtgagccggacgcagcataaatgacgcatcatgaaacgcctgacgcgccaacagagttaacgcttcgggtgcgactttcaaaatctcctgcccttcaaattcagatacgctaacgtgttcgctggttagcaggtaatactcagtatcatcttttttgagtggaaaaggagcctgataatgaaagggtttgtttgacattgttctctcacttactgcctggtttggttatgctctgggcgggtgttccgttgccctgttaaaagcgagtaacaatatcctacacacttttttaacaaaaactgagactagtacgactttttgcggctccaggttacttcccgtaggattcttgctttaatagcgggattaatttccacattaaaacagggattgatcatgcaaaaactcattaactcagtgcaaaactatgcctggggcagcaaaacggcgttgactgaactttatggtatggaaaatccgtccagccagccgatggccgagttgtggatgggcgcgcatccaaagagcagttcacgtgtgcacgatgccgcaggagatatcgtttcactgcgtgatgtgattgagagtgataaagcgactcttttgggagatgccgttgccaaacgctttggcgagttgcctttcctgttcaaagtattatgcgcagcccagccgctctccattcaggttcatccaaacaaacgcaattctgaaatcggttttgccaaagaaaatgctgcaggtattccgatggatgccgctgagcgtaactataaagatcctaatcacaagcctgagttggtttttgcgctgacgcctttccttgcgatgaacgcgtttcgtgagttttccgagattgtctccctgctccagccagtcgcaggtgcacatccggcgattgctcactttttacaacagcctgatgccgaacgtttaagcgaactgttcgccagcctgttgaatatgcagggtgaagaaaaatcccgcgcgctagcgattttaaaatcggccctcgacagccagcagggtgaaccatggcaaacgattcgtttaatttctgaattttacccggaagacagcggcctgttctccccgctgttgctgaatgtggtgaaattgaatcctggcgaagcgatgttcctgttcgctgaaacaccgcacgcttacctgcaaggcgtggcgctggaagtgatggcgaactccgataacgtgctgcgtgcaggtctgacgcctaaatacattgatattccggaactggttgccaacgtgaagttcgaagccaaaccggctaaccagttgttgacccagccggtgaaacaaggtgcagaactggacttcccgattcctgtggatgattttgccttctcgttgcatgaccttagtgataaagaaaccaccatcagccagcagagtgccgccattttgttctgcgtcgaaggcgatgcaacgctgtgtaaaggttctcagcagttacagcttaaaccgggtgaatcagcgtttattgccgccaacgaatcaccggtgactgtcaaaggccacggccgtttagcgcgtgtttacaacaagctgtaagagcttactgaaaaaattaacatctcttgctaagcttattaaaggcttataacaccttcaggcggccagtccgcctgatttcattttatggataatcattatgaataaatcgctggtagcggtaggcgtcattgttgcgctaggcgtagtctggacaggcggcgcatggtatacaggcaagaagattgaaacccatctcgaagacatggtcgcgcaggcgaacgcgcaactcaaactgacagctcctgaatccaacctggaagtcagttatcaaaactatcatcgcggcgtattcagcagccagttgcaactgttggtgaaacccattgccggaaaagtaaatccgtggattaaaagcggtcagagcgtcatcttcaacgaatcggttgatcatggtcccttcccgcttgcccagcttaaaaaactgaacctgatcccgtcgatggcatcaattcaaaccacgctggttaataacgaagtaagcaaaccactgtttgatatggcaaaaggtgaaacgccttttgagattaactcccgcattggttacagcggagattccagttccgacatttcgctcaagccactgaattacgagcaaaaggatgaaaaagtcgcatttagcggcggcgagttccagttaaatgcagacagagacggcaaagctatctccctttccggggaggcgcaaagtggtcggatagacgcggttaacgaatacaaccagaaagtgcagttaacctttaataatctgaaaaccgacggttccagcacgctggcaagttttggtgagcgcgtaggaaaccaaaaactgtcgctggaaaaaatgaccatttcagtggagggcaaagaactggcactgctggaaggcatggagatcagcggtaaatcggatctggtcaatgacggtaaaacggtcaatagccaactggattactcgctaaacagcctgaaggtacagaatcaggatctgggcagtggcaagctgactttaaaagtcggccaaattgatggcgaagcctggcatcagtttagccagcaatataacgcgcaaactcaggcgctgctggcacagccagaaattgccaacaatcccgaactttatcaggagaaagtgacggaagccttctttagcgctctgccgctgatgctgaaaggcgatccggtgattactatcgcgccgctaagctggaaaaacagtcagggtgaaagtgcgctgaatctgtcgctgttcctgaaagatccggcaacgactaaagaagcgccgcaaacgctggcgcaggaagtggaccggtcggttaaatctctggatgcgaaactgaccattccggtggatatggcaactgagttaatgactcaggtagcgaagctggaaggttatcaggaagatcaagcgaaaaaactggcgaaacagcaagttgaaggtgcatcagcaatggggcagatgttccgtctgaccaccttgcaggacaataccatcaccaccagcctgcaatatgctaacggtcagataacgttaaacgggcagaaaatgccactggaagatttcgtgggtatgtttgcgatgccggcattaaacgttccggctgtacccgctattccgcagcagtaattcacagccaaaacgccggagatttttctctccggcgttttttcttacttcagcataaagtcatactgaatactcattttcacatcccagtaattcaggcgatcgcccagcgcactgccatcgcgcttttcccgccctttatcggcagcaagaaagaaattcatcccttgtaacggcccttcgctgacccgatagttcataccacctaagatacccgcgccttcaatccgcacatctcgtttactggattcatagccgcgagtcacaatcggtgcaaatgtcagcgtaaattgcggagttaaacgatagttaacgcccaattgccaggactgcattccttcacggttacgatcaagacttaatgaaaagggatagccaatgtcggtatccaccacggcaccattcattgcatggcgcaaataaccaccactgccaaatacgcttccccacggcgcaatccaggtcaattgtccactaaccaacgccgtttcattgggctggctggtattacgacttaaaccttcgagttgcgcgtaaaagccgagcaactcccctttcaacgtataattcgggtcgagcggtatgcttttctcgagaatactttgtatctgattggaaacatctttctgtaccgatgcccccagagaatagcgactggtatcatcatgccaactggcggctaaaaaagaacgtgcgcgatgtttatcgtattttcccgtctggctgttatacaccccttcatcacgaataccggttgttgaatcggtccataaaaatactcgtgaacgccacattccccacaggtcaatatttggcgttaaagcccaacaacctaatgctccttcagaaactgtcggtaatgtacgttgcgaactgccagccattaacggaatacgataaggtaagctaccataactataatccgtcccgaagcgacctaatttaagcagactactttcactgggttttatttttactgcccccagggtaaagccaaaacttttatcaccatcaagataccaccgggtgctcatatcagcacgagcacctaatttataaacataatacgccccgccttcaacgccaataatattggaataataaccactattgaaatcgagcaatcctccctgtacccatgcgtaaatatctctccccgcgccagcactgggcttatcagccctgcgtaattcatttttcagtctgatgcgtagtcccgcttcatcgtcagccagttgcgccgcgtaagcagaggtaaggccagaggcagccgtcaggcaaataacggccatggccactatttttctcatagttgcacctttgatgttctgattatttttattgaatattaactagtgatatcgttgattaattgctgctgcacttttttacgattatcaatttcaacaacgatttctttgaattttttatccgtgagcggataaaaccagataatgacgaatgccagtagcataaatccgcaaggtactaaggcaattgatgtgcggatgcccataataacttccggcgtttgcgcctgattggcgatatatccgcttaatcccaaaataaaggcaggaattgaacctccgattgcctgaccgcatttacgggtaaatgagaatagtgaataggtgagcccttcaattcgcacgccagtcaggtattcaccgtattctacggtatcagcttccagtgcccacatcacggtcatggtaacgccctggccaattgatgcgatggccaacgcaaccaacgccaccggcagtgaccagacggaaacccagaagaacagcagataaccgcaggttcccagcaaagcgccaatcaggaaggtattctttttaccgatcctcgcgaccatccccggcaccagcggtgccgatgccacagtaccgaccaggttttgcaccagtaccagcacagtgaacagcccggtatcatttaacacatagcgcacgtagaacaacgacgaggcgctgaccgcgaaggtcgaaatcagcacacacagcgcaccgatgcacaacataaacagcgggcgattccgtttcagggtttgcagactgatcttcaatgacggctgcgccacgatacgtaccacattctcacgcgtcgatttgaagcagatgaagtaaagcaccattccggcaatcgccagcacaattgtccagaaatgatataccgacaccatctcttccgggctggagttcttaatgctcggtcctatcagaaatgccaggcagacaaaggtcaatgaagcggcaatcccgcgagccgcgcccagacgggcgcgggattgtggttgttgggtcatcgcggtagcaagtgaaccataaggaatattcaccaggctgtagcaaagcccgagtcccatgtaggtcaaatatgcatacacaactttgctgctatggctccagtcggtcggcacccagaataccagcacgctgaagatcattaacggcgcagtaccgaagagtaaaaacgggcggaattttccccatcgggtattcacactgtccaccactcgtccggcaaagacatcggcgaaggcatcgaatacccgcaccagtaacagcatggtgcccgccgcagcggcaccgacgccagcgacgtcggtgtagtaactcaacaggaagagcgcccccattgcgaaggcgaagttattggcgacgtcaccgaggctgtagccgacgatggtgcgccaggagagttgttgattcattgtttgcctccctgctgcggtttttcaccgaagttcatgccggtccagcgtttttgcagcagaaaagccgccgacttcggtttgcggtcgcgggtgaagatccctttcttgttaccgccaacgcgcaatatgccttgcgaggtcgcaaaatcggcgaaattccatacctgctcaccgacgacagcgctgacgcgatcaaagacgcggtgatacatatccagccatgcacactgatactcttcactccacatgtcggtgtacattgagtgcaggccggctaacgtatccacaccgtattcggtgatgataatcggctgatgcagtttctcctgccaggccagaagttctttttccagaaccttctctgccgtttccaaatcgccgctttggacataccaaccgtaataacggttcaggcacagcacatcaaagagatcgctgatggtatcggtgtgagcgtcgcagaacattacattgacacaggtgatcggacgcgtcgggtcgagtttacgcgttgcttccgccagtggcgcaaaatattcccgtgcaccttgcggacgggtatccggttcgttggcaatactccacatcaccacgcttgggtggtttttgtcacgcgcaatcagctctttaatcgcctgtaagtgcgcctgctgggtttccccgttgactgcctcttcgctgtacagttctttcggcttgttgcccgcttcgaaaccaatgcctaaagagaggttaaagccgacagctgcagtttcatcaatcaccacaattccatgttcatctgcccagtcgagcatctcttcagcgtaagggtaatgcgaggtacggtaggagttggccccaatccagtccattagtgcgtgatcgtgcaccatcagcacgttatcgaatcctttgccgcgcaaatccgcatcttcatgacgaccaaagccagtaaagtagaacggtttgtggttgatcaggaactgttcgcccttcactgccactgaccggataccgacgcgcagcaggtagatatcacactctgtctggcttttggctgtgacgcacagttcatagagataaccttcacccggttgccagaggtgcggattcactacttgcaaagtcccgctggtgccttgtccagttgcaaccacctgttgatccgcatcacgcagttcaacgctgacatcaccatttgcccccacctgccagtcaacagatgcgtggttacagtcttgcgcgacatgcgtcaccacggtgatatcgtccacccaggtattcggcgtggtgtagagcattacgctgcgatggatcccggcgtagttaaagaaatcatgaaagtaagactgctttttcttgccgttttcgtcggtaatcaccattcccggcgggatagtctgccagttcagttcgttgttcacacaaacagtgatacgtacacttttcccggcaataacatacggagtgacatcggcttcaaatggcgtatagccgccctgatgctccatcacttcctgattatttacccacactttgccgtaatgagtgaccgcatcgaaacgcagtacaatacgctggcccgcccaacctttcggtataaagacttcgcgctgataccagacgttgcccacataattacgaatatctgcatcggcgaactgatcgttaaaactgcccggcacagcaattgcccggctttcttgtaacgcgctttcccaccaacgctgatcaattccacagttttcgcgatccagactgaatgcccacaggccgtcgagttttttgatttcacgggttggggtttctacaggacgtaacataagggactcctcattaagataaaaatactggtcaacctttaatctgattagttaaccaattctgtgttgcacacagttatctgtgagaaacccacggaagagaaatggaaataaaaagaactgacacagcgatcaaaaaaccaaaaactgcaatacccacagcgtgatattgatcgcattaatctttaaaacagcgttgacagaagccacaaaataagcaatcgaacgttcgttcgaacatattgggaacgataaaccctcatgatatattgctatgatgaatatttaggtgggattctccgatcccggggaggatgatttttgcacagagaaattacgatatgaaacgcgggctcagttgtcaccagcccgcggaaagagagagaggatcaggatgcggttaatataccgccaatcatcgcgcgtaatccctgagcaaacgacgcttcacgcgccagatcttccgcttcgatatcggccagtacaccgtaggtcagatccagcagtaaacgtgaagtcattgccgtgttgatatctgggcttatctcgcctttttgctgggcatcacgcatccgctgggcaacaaattccgtgatcgtcatatgcttatttttaagcatggcggcgacctgtgggttacgcatcccttccgccataatttcgaccaccagcgctcgttgcccaaaggcttcatgggtgagagagacaatagactcgaccatatagtcaacgaaatgaatcccttcaatcggttcccggaaacgggccagcgccctctcctggtcctgtaagataatcgcctgaatcaaggcttctttggagatgaaatggtgatagagcgtcccgggactaatggcgcaggatttacagatggctttcatcgaggcactgtgaaatccattttctgaaaaaatctctctggcagcattgaggatccgggtccgtgtcggttgtgcttcagtctgcatgttatccatcattaaaccattatagttagcatgaataactagtttaccgcgttgtcaggtgagcgcctatcattgctgttgaatagtgcgaaggcacactcaattcgtaagctttttatccggctattggttaaccaatagccgtgatttggctgccagttgtttagcagagacgttgacgagttgcacacgctatcccggtaaacaacacatacggctgtttaccggttcgttagtgtattaattgagttcctgtaccccaccaccggagacggtgagaatttgtccgcttacccagctggctgcaggcgagcaaaggaacagcgccgcgttagcaatatcttgcggttggcccagacgtctgattggtgtgtgttgcaacattttctgttcaatctctggtgtaataacggatttcagggcatcggttaatattgcccccggtgcaatgccattcacccgaatatttttttcacccaggtcaaacgccatatttctgaccagatgactggccgcagctttagatgatgcataggaggtcatgtttatatttttattttctgccgccatagaagtaatggtcagaataacgccaccgccatttttttccatttctggcgcaacaagttgtgacagatggaaaaaagaaaatacattcagttcataagcgcggcgaaaatctgccattggcatatcaaacggtttaggcccaccgccaccggcgttgttaaccaggatatcaactttacccaacttactgacggcaaagtctgccagtgcagagagttcctgttcggaagtaatatcgcagcggcaggcaaatgcctgaccacccagttgttgaatttcatttacaacatgattagctgcatcggcgttaatatcactgaccaccacagatgcgccagctgtcgcgaatgtaatggcgatttctttaccaatacctgcacccgcacctgtgatgatggcgcattttccgtcgagtctcaggttgtcagaattaaacacataaacctcctgtgaacttcagtaaaaataaaaggcaccgcctgtgtgccacattttttatcattaaccttgaggaaaggacactaccaggtatagcagataaagagaggattatttctccgcaatgagccgggcaggaataataagattgcgagaatgcgtctcttcatgggtgattttttgcatcatgcgatccgcaagtgtggtaccaagttcccgcgctggcgtgctggcccaggtaacgggtatatcatcaagtgtggttggcgttgcatcggtaaatgccgccagcgaaacctgttgctcaaagtaacgatcgactccgctttccccgctttgccttcctgctttcagcaaaccaaaccatgcccccatcgcaatagtttcgttatagcaaaccacggcgctgatggtcgggttatgacgtaaaagcgccgtgatagcttccgcggcttgcttctggctggaagtgcactccagcacccaatcgctgtgaaacggcaggccaaattttagtagagtcgcacaatagccccccacccgttctgccagggttaatgaggaactttgtcctcccagccaggcgatacgctgatgcccattgcgaatgagatgctccgtcaacaactgtgcagcctgcatgttgtccgggcgaaccgtatcaacgtcatcaagataactggcacgggaagcgaaaatcaccgggatagctttttcttctgctatccgtcgcaggtcatcgctgcttcctgcagccccggcaatgaccacaccatcgacaccctgattcagtaatagtgaaaaccgctgtgccagctgctcgccgtctttaccgccgtgaagcaaaaaaaccatccgtccctgcgcttccagagcttccgtcaatccggccgtcaattcggcgtaaaacggcgcagataaatcacggacgatcaaaccaatgacgccgctttgcccgccgcgcagcgccgacgcctggcgattgcgcacaaatcccagctcttcaatggcggcgttaacgcgttctcctgtggcggtagagattcgccctttgccactaagcaccagcgaaacggtacttaccgacacgcccgcagccagcgcaacatcatgaatggttatttttttggcggtagccatgcagatgacctactccctgattatgtgacagataaaacgttttaccttttatttatcttatacccgctattatcgttgtgtaatgtgatttatgcctcactaaaatttgataaaacgttttatcttctcgcgcaatttattgaatccagattgttctctacgaggagtcgttttatgacggcgaaaacagcaccgaaagtcacgctgtgggagttcttccagcagttaggcaaaaccttcatgttacccgtggcattattgtcgttctgcggcattatgctcggcattggtagttctcttagcagccatgatgtcatcaccctgatcccggtcctgggcaaccccgtgttgcaggctatctttacctggatgagtaagattggctcgtttgcttttagtttcctgccagtcatgttctgtatcgccatcccgctgggtctggcacgcgaaaacaaaggcgtagcggcattcgctggcttcgtcggttatgcggtaatgaacctcgcggtaaacttctggttgaccaataaaggcattctgccaaccacggacgccgcggttctgaaagccaataacatccagagcattcttgggatccagtcgatcgacaccgggatcctcggtgcggtgatcgccggtattatcgtctggatgctgcatgagcgattccataatatccgcctgccggatgcgctggcattcttcggcggtacgcgcttcgtaccaatcatctcctcgctagtgatgggtcttgtcggcctggtgattccattagtctggccgattttcgccatgggtattagcggcttaggccatatgatcaacagcgcgggagatttcggaccgatgctgtttggtaccggtgaacgtctgctgttgccgtttggtctgcatcacattctggtggcattaattcgctttaccgacgcaggcggcacgcaggaagtctgcggtcaaaccgtcagcggtgcactgaccatcttccaggcgcaattgagttgcccaaccactcacggtttttctgaaagcgccacgcgtttcctttcgcaaggtaaaatgcctgcgtttctcggcggtctgccaggtgcagcgttagctatgtatcactgtgcgcgcccggaaaatcgccataaaattaaaggtctgctgatttctggcctgatcgcctgtgtcgttggcggcacgaccgaaccgctggaattcctgttcctgttcgtagcgccagttctgtatgtcatccacgcgctgttaaccggcctcggcttcactgtcatgtctgtgctcggcgtcaccatcggtaataccgacggcaatatcatcgactttgtggtgttcggtattttgcatggtctgtcaaccaagtggtacatggtgccagtagtggcggcaatctggtttgtcgtttactacatcatcttccgtttcgctatcacccgcttcaatctcaaaaccccggggcgcgatagtgaagttgccagttcaatcgaaaaagccgttgccggtgcgccgggtaaatcaggttacaacgttccggcaatcctcgaagccttaggcggtgccgacaatattgtcagcctcgataactgcattacgcgtctgcgtttgtctgtaaaagatatgtcgcttgttaatgtgcaggcactgaaggacaatcgggcaattggcgtagtacaacttaatcaacataacctgcaggttgttatcgggccacaagttcagtcagtaaaagatgaaatggccggtctgatgcatactgtccaggcataaggataagatatgttcgatttttcaaaggtcgtggatcgtcatggcacatggtgtacgcagtgggattatgtcgctgaccgtttcggcactgctgacctgttaccgttcacgatttcagacatggattttgccactgccccctgcattatcgaggcgctgaatcagcgcctgatacacggcgtgtttggctacagccgctggaaaaacgatgagtttctcgcggctattgcccactggttttccacccagcattacaccgccatcgatcctcagtcggtggtgtatggcccttctgttatctatatggtttcagaactgattcgtcagtggtctgaaacaggtgaaggcgtggtgatccacacacccgcctatgacgcattttacaaggccattgaaggtaaccagcgcacagtaatgcccgttgctttagagaagcagcctgacggctggttttgcgatatgggcaagctggaagccgtgctggcgaaaccagaatgtaaaattatgctcctgtgtagcccacagaatcctaccgggaaagtgtggacgtgcgatgagctggagatcatggctgacctgtgcgagcgtcatggtgtgcgggttatttccgatgaaatccatatggatatggtttggggcgagcagccgcatattccctggagtaatgtggcgcgcggagactgggcgttgctaacgtcgggatcaaaaagtttcaatattcccgccctgaccggtgcttacgggattatagaaaatagcagtagccgcgatgcctatttatcggcactgaaaggacgtgatgggctttcttccccttcggtactggcgttaactgctcatatcgccgcctatcagcaaggcgcaccatggctggatgccttacgcgtctatctgaaagataacctgacgtatatcgcagataaaatgaacgctgcgtttcctgaactcaactggcagatcccgcaatccacttatctggcctggcttgatctacgtccgttgaatattgacgacaacgcgttgcaaaaagcgcttatcgagcaagaaaagatcgcgatcatgccgggatatacctacggtgaagaaggtcgtggttttgtccgactcaatgccggctgcccacgttcgaaactggaaaaaggtgtggctggattaattaacgccatccgcgctgttggttaaccccaattgcgcaacgtaaaaaatcgttgcgcaatcgtggatttttaccctgctttgtttttataatggtgcgcacttttatatccagaaaaagagtgcgaccatgattgataccaccctgccattaactgatatccatcgccaccttgatggcaacattcgtccccagaccattcttgaacttggccgccagtataatatctcgcttcctgcacaatccctggaaacactgattccccacgttcaggtcattgccaacgaacccgatctggtgagctttctgactaaacttgactggggcgttaaagttctcgcctctcttgatgcctgccgccgcgtggcatttgaaaacattgaagatgcagcccgtaacggcctgcactatgtcgagctgcgtttttcaccaggctacatggcaatggcacatcagctgcctgtagcgggtgttgtcgaagcggtgatcgatggcgtacgtgaaggttgccgcacctttggtgtgcaggcgaagcttatcggtattatgagccggaccttcggcgaagccgcctgtcagcaagagctggaggcctttttagcccaccgtgaccagattaccgcacttgatttagccggtgatgaacttggtttcccgggaagtctgttcctttctcatttcaaccgcgcgcgtgatgcgggctggcatattaccgtccatgcaggcgaagctgccggaccggaaagcatctggcaggcgattcgtgaactgggggcggagcgtattggacatggcgtaaaagccattgaagatcgggcgctgatggattttctcgccgagcaacaaattggtattgaatcctgtctgacctccaatattcagaccagcaccgtggcggatctggctgcacatccgctgaaaacgttccttgagcatggcattcgtgccagcattaacactgacgatccaggcgtgcagggagtggatatcattcacgaatataccgttgccgcgccagctgctgggttatcccgcgagcaaatccgccaggcacagattaatggtctggaaatggctttcctcagcgcagaggaaaaacgcgcactgcgagaaaaagtcgccgcgaagtaacaaaaatggatggtgctaattgcaccatccccttttcacgcaaggcacaaagtcgcgcgatgtttggcggattcgatgcccagctcaatcaactccattacctggattgcctgacttgccggaaccggattttcaccatcgccatttaacgcatcacgaatagccgcatagtaagccggataattccccggcactgtcaacagcgtttcttcgacacgttcctcaccttccacgcgggtaagtacgccatcgcgcatatcgtagccccagtcttcctgcggcagacgctcgccatttttcagacgttcttcctgtggatcgaggccatatttcacataactgcctcgggatccatgcacgatataccgtgctgactcggctgctgccagcatggtgccgtgtaaaatcactcgccgctgcggataggacaagatagcgtggaaataatcggtcgactgcgctccgggccgtaactgtgccaaatctaccgtcatgctaaccggtaaaccaaataacgtaatggcctgatcaagaaggtgcggtgctaaatcgtaccagataccgctgcctgggccgccctgttcacgccaacgatcgcgcacctgcgggcggaagcggtcaaaatgggactcaacgtaagcaatttcacccagcacgccttccgcgagcaaacctttaagcgtcaggaaatcgctatcccagcgacggttatggaatacagacagcactcgccccaggctttttgccagcgcatccagctctcgcgcttgtgacagtgtcacggtaaagggtttatcaacgaccacatgtttacccgcctcaagcgccgctttggctaacggaaaatgggtatcgttgggtgtaggaatgacaatcaggtctatgttgggatcgttaaacagatgcttcggctcagagacaaccgtaaccgttggccagtcagcttttacttttgtttcatcgctgctggagattaccgccagctccagcccgggcgtgcccgcaatcaggggcgcatggaaggttttgctcgcataaccatacccaatcaacccaacacggatgttgtcgctcatgtcattgcctctcattgaagtatgatggctatttgacactatcctttaccctcgctcaacagtttaataacctgccagcaataagggatgttgtttaacttaagtcaaaaaaatagcgatttttccaacgacaaaagctaaatattgcaaaaacctcagtaaaaatcttgctggagctattattgctaagtaacatttaccccctgaagttaatggatcaatcaacagagatgtgggctgtaatgaatcgtcttattgaattaacaggttggatcgttcttgtcgtttcagtcattcttcttggcgtggcgagtcacattgacaactatcagccacctgaacagagtactacagtacaacacaagtaagctctgcacttgttgagcgacatgctgcccgtccgggtgcatgttttcacttgtcggatattaaaccaggaatttattatcttgttcgatgttgttgatgattgtcagggatagtaaagcgcgttactctttccagagcagtttttcatccctgaatatttgccatcagcacattcttattattgtaataacacaagcgttcacttttggtgaaattttatcatcactaataatacctacccctttggtattgattattttatggaccttttatgactgttcaggactacttattaaaatttcgcaaaatcagttcactcgaaagtctggaaaaactctacgatcatcttaattacaccctgacggacgatcaggaactgatcaatatgtatcgtgctgccgatcaccgtcgcgcagagctggtttctggcgggcgtttgtttgacctcggccaggtaccgaagtccgtctggcactatgtccagtaaagaaagtagcgatcggttataaaagccttataataacgcccctaaaattagatttgtctgtttgcgtcgctattctggagaacctatgaccaccacaacgccacaacgtattggaggctggttgcttggcccgttggcctggcttttagtcgctctgttgagtacgacgctggcgttgttgctgtataccgctgcgttatcttctccgcaaacatttcaaacgctcggcggacaagcactgacgacacaaatcttatggggcgtttcttttattaccgctatcgccatgtggtattacacactgtggttgaccatcgctttctttaaacgtcggcgttgtgttcctaaacactatattatctggctgcttatttccgtattgctggcagtaaaagcgttcgctttttcacccgtagaagatggcatagccgttcgccagttgctgtttactttgttggcaaccgcattgatcgtcccctatttcaaacgctcgtcgcgggtgaaagcgacgtttgtgaatccgtaataaccttacagttaacctgttgtcgcctgctctggattaacggataataggcggcttttttatttcaggccgaaaaatgactgactacctgttactgtttgtcggaactgtactggtcaataactttgtactggtcaagtttctcggtctctgtccgtttatgggggtttccaaaaagctggaaaccgcgatgggcatggggctggcaacaacgtttgtaatgacgctggcgtctatttgcgcctggcttatcgatacgtggattttgatcccacttaatctgatttacctgcgcaccctggcgtttattctggtgattgctgtggttgtgcagttcaccgaaatggtggtgcgcaaaaccagcccggtactttaccgtctgctggggatttttttgccgcttatcaccaccaactgtgccgtgctcggcgtggcgttgctgaatatcaatctcgggcacaatttcttgcagtcagcgctgtacggtttttccgccgctgtcggtttctcgctggtgatggtgctcttcgccgccatccgcgaacgccttgctgtggctgatgtcccggcaccttttcgcggtaatgccattgcgttaattaccgcaggtcttatgtctctggcctttatgggctttagtggtttggtgaagttgtaatgaatgctttctggattgccgttgccgccgtgagcctgctgggcctggcgtttggcgccattctgggttatgcctcccgccgttttgcggtggaagacgatccggtcgttgagaaaattgacgaaatcttaccgcagagccagtgtggtcagtgcggttatcccggctgtcgcccctacgcggaagccatcagctgtaacggtgaaaaaatcaaccgttgcgccccaggtggcgaagctgtgatgctaaaaattgccgagttgcttaatgtcgagccgcagccgctggatggcgaagcgccagagctaacgccagcgcggatggtggcggttattgatgaaaataactgtattggctgcactaaatgtattcaggcgtgtccggtagacgccatcgttggcgctacccgcgccatgcatacggtaatgagtgatctctgtacgggctgcaatttatgtgttgatccgtgcccgacgcactgcatctcgttgcaaccggtcgcagaaactcctgactcctggaaatgggatctgaacaccattcccgtgcgtatcattcccgtggaacaccatgcttaagttattctctgcattcagaaaaaataaaatctgggatttcaacggcggcatccatccaccggagatgaaaacccagtccaacggtacgcccctgcgccaggtaccactggcgcagcgttttgtcattccactgaaacaacatattggcgctgaaggtgagttgtgcgttagcgtcggcgataaagtattgcgcggccagccgcttacccgtggtcgcggcaaaatgctgcctgttcacgcgcccacctcgggtaccgttacggctattgcgccccactctacgtctcatccttcagctttagctgaattaagtgtgattattgatgccgatggcgaagactgctggatcccgcgcgacggctgggccgattatcgctctcgcagtcgcgaagagttaatcgagcgcattcatcagtttggtgttgccgggctgggtggtgcgggatttccgacaggcgttaaattgcagggcggtggagataagattgaaacgttgattatcaacgctgctgagtgcgagccgtacattaccgccgatgaccgtttgatgcaggattgtgcggctcaggtcgtagagggtatccgcatccttgcgcatattctgcagccacgcgaaattcttatcggtattgaagataacaaaccgcaggcgatttccatgctgcgtgcggtgctggcagactctcacgatatttctctgcgggtgattcccaccaaatatccttctggcggtgctaaacaattaacctacattctgaccgggaagcaggttccacatggcgggcgttcatccgatatcggcgtattaatgcaaaacgtcggcaccgcttatgcagtgaaacgtgccgttattgatggcgagccgattaccgagcgtgtcgtgaccctgactggcgaagcaatcgctcgcccgggcaacgtctgggcacggctgggtacgccagtgcgtcatttattgaatgatgccggattctgcccctctgccgatcaaatggtgattatgggcggcccgctaatgggctttaccttgccgtggctggatgtcccggtcgtaaagattaccaactgtcttttggctccctctgccaatgaacttggcgaaccacaggaagaacaaagttgcatccgttgtagcgcctgtgctgacgcctgccctgcggatcttttgccgcaacagctgtactggttcagcaaaggtcagcaacacgataaagccaccacgcataacattgccgactgcattgaatgtggggcttgcgcgtgggtttgcccgagcaatatccccctggtgcaatatttccgtcaggaaaaagctgaaattgcggctattcgtcaggaagaaaagcgcgccgcagaagccaaagcgcgtttcgaagcgcgccaggctcgtctggagcgcgaaaaagcggctcgccttgaacgacataagagcgcagccgttcaacctgcagccaaagataaagatgcgattgctgccgctctggcgcgggtgaaagagaaacaggcccaggctacacagcctattgtgattaaagcgggcgaacgcccggataacagtgcaattattgcagcacgggaagcccgtaaagcgcaagccagagcgaaacaggcagaactgcagcaaactaacgacgctgcaaccgttgctgatccacgtaaaactgcagttgaagcggctattgcccgcgccaaagcacgtaagctggaacagcaacaggctaatgcggagccagaagaacagattgatccgcgcaaagccgccgtcgaagcggctattgcccgtgccaaagcacgcaagctggaacagcaacaggctaatgcggagccagaagaacagattgatccgcgcaaagccgctgtcgaagcggctattgcccgtgccaaagcacgcaagctggaacagcaacaggctaatgcggagccagaagaacagattgatccgcgcaaagctgccgtcgaagcggctattgcacgcgccaaagcgcgcaagctggaacagcaacaacaggctaatgcggaaccagaagaacaggtcgatccgcgcaaagccgccgtcgaagcggctattgcacgcgccaaagcgcgcaagctggaacagcaacaacaggctaatgcggaaccagaagaacaggttgatccacgcaaagcggcagttgctgcggctattgcccgcgttcaggccaaaaaagccgcccagcaaaaggttgtaaacgaggactaaatggtattcagaatagctagctccccttatacccataaccagcgccagacatcgcgcattatgctgttggtattgctcgcagccgtgccaggaatcgcagcgcaactgtggttttttggttggggtactctcgttcagatcctgttggcgtcggtcagtgctcttctggccgaagctctcgtcctcaaactacgcaagcagtcggtagctgcaacgttgaaagataactcagcattgctgacaggcttattgctggcggtaagtattccccccctcgcgccatggtggatggtcgtgctgggtacggtgtttgcggtgatcatcgctaaacagttgtatggcggtctggggcaaaacccgtttaatccggcaatgattggttatgtggtcttactgatctccttcccggtgcagatgaccagttggttaccgccacatgaaattgcggtcaacatccctggttttatcgacgccatacaggttattttcagcggtcataccgccagtggtggtgatatgaacacgctacgcttaggtattgatggcattagtcaggcgacaccgctggatacattcaaaacctctgtccgcgcaggtcattcggttgaacagattatgcaatatccgatctacagcggtattctggcgggcgttggttggcaatgggtaaatctcgcctggctggctggcggcgtatggttgctgtggcagaaagcgattcgctggcatattcccctcagcttcttagtaacgctggcgttatgcgcaacgttgggctggttgttctcaccagaaacactggcagcaccgcaaattcatctgctgtctggagcgaccatgctcggcgcattctttattttgactgacccggttaccgcttctacgaccaatcgtggtcgtcttattttcggcgcgctggcgggcttattagtctggatgatccgcagtttcggcggctatcctgacggcgttgcttttgccgtcctgctggcgaacatcacggttcctctgatcgattactacacgcgtccgcgcgtctacggccatcgcaaagggtaaaccatgctgaaaactatccgaaaacacggcattacgttggcgctctttgcagcgggttcaacagggttaactgcggccatcaaccagatgaccaaaacgacaattgctgaacaggccagtctgcaacaaaaggcgttatttgatcaggtgctgccagctgaacgctataacaatgcgctggcacagagttgctatctggtaactgcgccagagttaggtaaaggtgagcatcgggtttacatcgccaaacaggatgacaaaccggtagctgccgttctggaagcaaccgcgccagatggctattccggtgcgattcagctgctggtgggagccgattttaacggcacggtacttggcacgcgcgtgactgagcaccacgaaacgccagggcttggcgataaaatcgaactgcgcctttctgactggatcacccattttgcgggtaaaaaaatcagtggtgcggatgatgcgaactgggcggtgaagaaagatggtggtgatttcgaccagttcaccggcgcgacgattactccccgcgcggtggttaatgcggtaaaacgcgccggattgtacgctcagacgttaccggcacaactttctcaacttcctgcctgtggagaataaaacgtgagcgaaattaaagacgttattgttcaggggttgtggaaaaacaactctgcgctggtccagttgctcggcctttgtccgctgttggcggtcacgtccactgccactaacgctctgggtttaggacttgcgactacgctggtactgacgctaaccaacctgaccatttcgacgctgcgtcactggacgcccgccgagatccgcattcccatttacgtgatgatcatcgcctcggtggtcagcgctgtacagatgctgatcaacgcctacgcctttggcctgtatcaatcattagggatttttattccgctgattgtcactaactgtatcgttgtgggccgcgctgaagccttcgccgccaaaaaaggtccggcgctttcggcactggacggcttttcaattggtatgggcgcaacctgcgccatgttcgtgctgggttcactacgcgaaattatcggcaatggcacgttgtttgacggtgcagatgcgctgttaggtagctgggcgaaagtattacgcgtggagattttccacaccgactcccctttcctgctggcgatgctgccaccaggtgcatttattggcctgggactgatgctggcaggaaaatacctgattgatgaaaaaatgaaaaagcgccgtactgaagcagttgccgaacgtgcattgccaaacggtgaaacagggaatgtctgatgaacaaagcaaaacgcctggagatcctcactcgcctgcgtgagaacaatcctcatcccaccaccgagcttaatttcagttcgccttttgaattgctgattgccgtactgctttccgctcaggcgaccgatgtcagtgttaataaggcgacggcgaaactctacccggtggctaatacgcctgcagcgatgcttgaactgggcgttgaaggggtgaaaacctatatcaaaacgattggcctttataacagcaaagcagaaaatatcatcaaaacctgccgtatattactggaacaacataatggcgaggttccggaagatcgtgctgcgcttgaagccctgcctggtgtaggtcgtaaaacagccaacgtcgtattaaacactgcattcggctggccgactattgctgtcgacacgcacattttccgcgtttgtaatcgtacacaatttgcgccggggaaaaacgtcgaacaggtagaagaaaagctactgaaagtggttccggcagagtttaaagtcgactgccaccattggttgatcctgcacgggcgttatacctgcattgcccgcaagcctcgctgtggctcttgtattattgaagatctttgtgaatacaaagagaaagttgacatctaaagatcaggggtaacaccgattaccccattcataacctttctttatcctcttttaaaacatctttttaacgtcaatgatgccattgcttagcgttatcatcaggtaatccgtttgcagataaccaaaaatgcaggttaattgtttttttaatagcgaaattttctattcattcgtgatcaagatcacgatgctgtggcaatgtaaaaacattgcaagaatcaggttaaaatcatttaaatttacacacgcaacaaatattgacctacaaaacattacactggctatttttcagaaactggactatctcactaggaaaaacgccaaatagtagaacatatcgccattaagccatcatcaccctctcagggtagtgaaaaaatctgccgttacgttttttgaaaaatttaacgctggataacatttcccggaatggttgaattccccgcctcagttatatgtaacagattattacaaaggacttgtctgaaagtgcaagatagtgaacattacctgccgtttcccctcccactataacaattgcgcgtatgttttttagacataacgcgagaaagcacccccgttaatatgggatgtaaaaaaagaggtaaaagtgtccactgcaaaccaaaaaccaactgaaagcgtcagtttgaacgcttttaaacaacctaaggcgttctatctcatcttctcgattgagttatgggaacgttttggttattacggcctacaaggaattatggctgtttacctggttaaacaactgggtatgtctgaagcggattcaatcacccttttctcttcctttagtgccctggtttatggtctggtcgctatcggcggctggttaggtgacaaggtactgggtactaaacgcgtaattatgctcggcgctattgtgctggcgattggttatgctctggttgcctggtctggtcacgacgctggtatcgtttatatgggtatggcggctattgcggtcggtaacggcctgtttaaagctaacccgtcttctctgctttctacatgctatgagaaaaacgacccgcgtctggacggtgcattcaccatgtactacatgtccgtcaacatcggctctttcttctctatgattgctacgccgtggctggccgcgaaatacggctggagtgttgcgtttgcgttgagcgttgtaggcctgctgatcactatcgttaacttcgccttctgccaacgttgggttaaacagtacggttcaaaaccagacttcgagcctatcaactaccgtaacctgctgctgaccattattggtgttgtggcactgatcgctatcgccacctggctgctgcacaatcaggaagttgcgcgtatggcgctgggcgttgttgccttcggtatcgtggttatcttcggtaaagaagccttcgcgatgaaaggtgctgcgcgtcgtaaaatgatcgttgccttcatcctgatgctcgaagccattatcttcttcgtgctttatagccagatgccaacgtcactgaacttctttgcgattcgtaacgttgaacacaccattctgggcctggccgtagaacctgagcagtatcaggcactgaacccgttctggatcatcattggtagcccgattctggccgctatctataacaagatgggcgataccctgccaatgccaaccaagtttgctatcggcatggtgatgtgttctggtgcgttcctgattctgccgctgggtgcgaaattcgcgtctgacgctggtatcgtgtctgtaagctggctggtcgcgagctatggcctgcagagtatcggggaactgatgatctctggcctgggtctggcaatggttgcacaactcgttccgcagcgtctgatgggcttcattatgggtagctggttcctgaccactgccggtgcaaacctgattggtggttatgttgcaggtatgatggctgtgccggataacgttaccgatccgctgatgtcactggaagtctatggtcgcgtattcttgcagattggtgtcgctactgccgttattgcagtactgatgctgtttaccgcgccgaaactgcaccgcatgacgcaggatgacgctgcagacaaagcggcgaaagcagccgtagcgtaaaattcagggaaactcttttacaagccgctaacttttcgttagcggctttttttttgttcagcaacgcactaccatactttaaaccacagacaaaaggagttaccgatgaaattgttctacaaaccgggcgcctgctctctcgcttcccatatcaccctgcgtgagagcggaaaggattttacgctcgtcagtgtggatttaatgaaaaaacgtctcgaaaacggtgacgattactttgccgttaaccctaagggacaggtacctgcattgctgctggacgatggtactttgctgacggaaggcgtagcgattatgcagtatcttgccgacagcgtccccgaccgccagttgctggcaccggtaaacagtatttcccgctataaaaccatcgaatggctgaattacatcgccaccgagctgcataaaggtttcacacctctgtttcgccctgatacaccggaagagtacaaatcgacagttcgcgcgcagctggagaagaagctgcaatatgtgaacgaggcactgaaggatgagcactggatctgcgggcaacgatttacaattgctgatgcctatctgtttacggttctgcgctgggcatacgcggtgaaactgaatctggaagggttagagcacattgcggcatttatgcaacgtatggctgaacgtccggaagtacaagacgcgctgtcagcggaaggcttaaagtaatagccatcggcccacaggtcgttgtgggccgaaatgagatatttcagagctttgttgcgctgaaataatgttctggattggcaatacgatcctgagcagcaaccacttgcagctcatattcctgcattgcttttgtggtcaccatgatttcgtatactgcagcggtcacatgttccagggcctcctgcagcgttgccccctgaagcagtttcaccagcagtaaaccgctcgtcacatcaccaacacctaccggctggcgcataccaaaatctaccagcggacggctgatatgccaggcttcatcggcggtgactagcagcatttcaaaacggtcacggctgtagccagctcgcgccaggtgtttaaccaacacaatttgtggcccttgcgcaatgagttcgcgcgctgccagaaccgcttcttcgacgttctttaccggatgctcacagagtatttccagctcaaccagattcggcgcaatgatatcgctggcaggcaaaccgtgccgcacatgaaactctgcgacacccggtgcaacgatacagcctttttccggatgacccattaccggatcgcaaaaatatttcgcctgtggattcgctgctttcacctgacgaacgataccgaggatatgttcaccctgctccgccgatcccagatagccacttaatacggcatcacaggtgtgtaatttatcaatggcggcaatgccttgcacaatttcggttaaatggctgggcggcatcacgcagccagtccatttgccgtattgggtgtgattagaaaattgaacggtgttcagcggccagacgttcgcgcccaggcggcgcatcggaaactctgccgcactgttacccgcatgaccataaacaacgtgagactggatagcgagaatatttttcatcatgttccctgtataaaaaccagggggagtgatttctcactccccctttccacttaatgcattatttccagcaaatcagacagtaattctttttgccacgacgcagtaaggtaaaacgaccaaacagacgatcttcttctttaaagaagtattcaggatcggactgtttttcaccgttaatggtgatggcattggaggcgatagttttacgcgcctgaccacgggaaggttgcagttcagaatcgaccagcgcctgcatcaggtctgcgcccttttccatctcaaccatcggtacgccgtcctgcgccagctgttcgaagtccgcttcactcagcgcactcaaggaaccgctgaacaggcattcggtaatacgttttgccgcctgcaaaccgtcttcaccatgcaccagacgtgtcacctgttctgcaagcacatactgggcgcgcggtgctttaccgctgtttttatcttcttcttccagggcgttgatctcttcaatgctcatgaaggtgaagaacttcaggaagcggtaaacgtcggcatccgcagtgttgatccagaactggtagaatttgtacgggctggttttcttcggatccaaccagactgcgccgccttcagttttaccaaatttggtgccgtctgctttggtgatcagcggaacggtcaagccaaacacctgattctgatgcagacgacgggtcaggtcgataccagaagtgatgttaccccactggtcagaaccaccgatttgcagcaccacaccgtactgtttgttcagacaggcgaagtcataaccctgcaacaggttgtaggaaaactcagtgaacgaaatcccctgatcttcacggttgagacgctgcttaaccgcttctttgttgatcatctggttaacggagaagtgtttgccaatatcgcgcaggaaggtcagcacattcatattgccgaaccagtcatagttgttcgccgcgatagcagagttttctccacagtcgaaatcgaggaacggggcaacctgcttgcggattttgtccacccactcctgaacagtttcttcagtgttcagcttacgctcggcagctttgaagctcgggtcgccaatcagacccgtcgcgccgcctaccagcgcaaccggcttgtggcccgcctgctggaagcgtttcaggcataacaatggaacaagatgccccaaatgcaagctgtcagcggtaggatcgaagccgcaatagagcgcgatcgggccttgcgccagtcgctctgctaacgcttcctcgtccgtcacctgggctaccagcccccgctcttgcaattgtttaatcaagttactgcttgccatcaaaatctccatgtatataacgactgcacctttgccggtacacgacttttcgccagatgcgaaagagacatagaataaagtgccagaatcaggagtaccagcgattaaagcaagatttttgcatcttttcagggtgcaagacgatcaatcttccacgcatcattttcacgctggtacaaaaagcggtcatgcaggcgatgctcaccgccctgccagaactcaatctgttcaaggctgacgcgaaaaccgccccaaaaacttggcaatggcacttcgccctgttgaaacttctgcttcagctccaggaatttactttcaaggataccgcgggcagaaatgcgactggactgcttcgaaacccatgccccaatctggctatcacgcgggcggctatgaaaatatttcatcacttcgagagtcgaaagtcgttccgctttaccgatcaccatcacctggcgttcaagggtatgccacgggaacagcaggctaacgcgcggattattttcgatttgatgtgctttacggctgccgaggttggtgtaaaacaccatgcctttttcgtcgtaatgtttgagtaaaacaatgcgctgataaggctgatcatgttcatccacggtagcgaccaccatcgcggtagggtcagccagtttggcttcacaagcctgagagagccaacgttcaaaaagggttaatggatcggcgggtagatcgcggcggcgtaacccgcctttggtgtattcacggcgcagatgcgcgatttgctgcaattcgtcgttatcagacatggttttctttacggattgtcagtgggtgacgctattgtgcgccgcccctggaaaaatctcaacgctgcggattttgtaactgacagttattcaagacgatgcggtcgcgtttatagacagtcgcttcctcgcctttcgaccagaaaacatagattccgtcggtgtaacgtgcaccagacgctgaaatgccctgtttgagatgcagtagttgattatcgtaaacaaaactgacttcctggcgcggattattcagtttgaccgtcaacggtttttcatcacactggtattccagcgtatcggtttgcatgcgctcaaccagttgattgaacgcgctacagccggtgagaagcaccggcaaacagatcagtaacagttttttcatagacatatcccgaagactttcctggtctggagggcaatacgccctccctaacgttccaagtgtaacggcagacgcggtaagaaaaattcagttaactctgatatcacgggttagcggggaaaatagcccccagtaccgtctcctggcttgcgccagtgacggaaggcagatttcctggtaatcccgccagcgttcgccaggcaagccaggcgaacgccaatgcttccatgtcatcgccactaatgccaacggcatcggtggtggtgacttctgtgcctggcagtaatgccgccagacgcgccatgagtagcggattacgactacctccaccacataccatcaatcgttcgcagccaccgctcaacaaaacttgttcagaaatggtcacggcggtgagttctgccagtgtggcctgcacatcacggggatcaacccccggaaaatggcgcaaatggcgctccagccagccgtagttaaagtattcgcgtccggtgcttttcggtgcgggttgcgagaaatatgggtcgcagagcatattttgcagcagtgggagaataactttacccgcccgtgcccactcggcatctttatcgtaaggtttaccggcctgacgccagatccaggcatccatcagcatgttaccaggaccggtatcgtagcccccaaccggctggccaggaatgagcagtgacagattggcgatgccgccaatattgagcaccattcgtcgctcggttgggtgagccagcagcgcatgatggaacgcaggtaccagcggtgcaccttgtcctcccaaggcaatatcgcgacggcgaaaatcaccgacaaccgtaattccggtgcgcgccacaatttgattgttatcgccaatctgtaaagtgtgtggtgccacgcccgtcggttcgtgccagacggtttgaccgtggcagccgatcgcaactatatctctcgcctgcaggttttgttccttaagcaaggcattgaccgcatcagcaaaaagtcgcccaagttgagtatcaagctgtccaaactgcgaaagtgtaagctgctggccctggcaaatatccagtacagcctgtttcagagacaccgggatcggccagctcaaacttgccagctgtgcgacccggtgttcatcaattgtcgccaacacaacatcaacaccatcaaggctggtgcctgacataacgccaataaagcggcccgatttcatagttcatcctttttcaatctgacgtttgcgcaccactcaaacataaacttttcgtgaataccatgcggaatgaccaatttttaccgttggtagtaaaacattatcttcaaatcaataatcatcatgaatattttgtttataattggttgatcctactttcattatgatttgctcatatttggtagaacatgtaaccatggattcacatatgccatatactttgaccatgagggatgcttgcgtggcgtttcatggtgaacaggagatttttcaatgattaaacgcgtattggttgttt
